United States Patent Application Publication US 2026/0224743 A1 - sequence listing, part 2

SEQ ID NO: 16193 - RNA, 130 nt, synthetic construct
  source 1..130: mol_type = other RNA
  modified_base 1: mod_base = OTHER; note = 2'-O-methyl modified nucleotide with phosphorothioate linkage
  modified_base 2: mod_base = OTHER; note = 2'-O-methyl modified nucleotide with phosphorothioate linkage
  modified_base 3: mod_base = OTHER; note = 2'-O-methyl modified nucleotide with phosphorothioate linkage
  modified_base 29: mod_base = OTHER; note = 2'-O-methyl modified nucleotide
  modified_base 30: mod_base = OTHER; note = 2'-O-methyl modified nucleotide
  modified_base 31: mod_base = OTHER; note = 2'-O-methyl modified nucleotide
  modified_base 32: mod_base = OTHER; note = 2'-O-methyl modified nucleotide
  modified_base 33: mod_base = OTHER; note = 2'-O-methyl modified nucleotide
  modified_base 34: mod_base = OTHER; note = 2'-O-methyl modified nucleotide
  modified_base 35: mod_base = OTHER; note = 2'-O-methyl modified nucleotide
  modified_base 36: mod_base = OTHER; note = 2'-O-methyl modified nucleotide
  modified_base 37: mod_base = OTHER; note = 2'-O-methyl modified nucleotide
  modified_base 38: mod_base = OTHER; note = 2'-O-methyl modified nucleotide
  modified_base 39: mod_base = OTHER; note = 2'-O-methyl modified nucleotide
  modified_base 40: mod_base = OTHER; note = 2'-O-methyl modified nucleotide
  modified_base 69: mod_base = OTHER; note = 2'-O-methyl modified nucleotide
  modified_base 70: mod_base = OTHER; note = 2'-O-methyl modified nucleotide
  modified_base 71: mod_base = OTHER; note = 2'-O-methyl modified nucleotide
  modified_base 72: mod_base = OTHER; note = 2'-O-methyl modified nucleotide
  modified_base 73: mod_base = OTHER; note = 2'-O-methyl modified nucleotide
  modified_base 74: mod_base = OTHER; note = 2'-O-methyl modified nucleotide
  modified_base 75: mod_base = OTHER; note = 2'-O-methyl modified nucleotide
  modified_base 76: mod_base = OTHER; note = 2'-O-methyl modified nucleotide
  modified_base 77: mod_base = OTHER; note = 2'-O-methyl modified nucleotide
  modified_base 78: mod_base = OTHER; note = 2'-O-methyl modified nucleotide
  modified_base 79: mod_base = OTHER; note = 2'-O-methyl modified nucleotide
  modified_base 80: mod_base = OTHER; note = 2'-O-methyl modified nucleotide
  modified_base 81: mod_base = OTHER; note = 2'-O-methyl modified nucleotide
  modified_base 82: mod_base = OTHER; note = 2'-O-methyl modified nucleotide
  modified_base 83: mod_base = OTHER; note = 2'-O-methyl modified nucleotide
  modified_base 84: mod_base = OTHER; note = 2'-O-methyl modified nucleotide
  modified_base 85: mod_base = OTHER; note = 2'-O-methyl modified nucleotide
  modified_base 86: mod_base = OTHER; note = 2'-O-methyl modified nucleotide
  modified_base 87: mod_base = OTHER; note = 2'-O-methyl modified nucleotide
  modified_base 88: mod_base = OTHER; note = 2'-O-methyl modified nucleotide
  modified_base 89: mod_base = OTHER; note = 2'-O-methyl modified nucleotide
  modified_base 90: mod_base = OTHER; note = 2'-O-methyl modified nucleotide
  modified_base 91: mod_base = OTHER; note = 2'-O-methyl modified nucleotide
  modified_base 92: mod_base = OTHER; note = 2'-O-methyl modified nucleotide
  modified_base 93: mod_base = OTHER; note = 2'-O-methyl modified nucleotide
  modified_base 94: mod_base = OTHER; note = 2'-O-methyl modified nucleotide
  modified_base 95: mod_base = OTHER; note = 2'-O-methyl modified nucleotide
  modified_base 96: mod_base = OTHER; note = 2'-O-methyl modified nucleotide
  modified_base 127: mod_base = OTHER; note = Nucleotide with phosphorothioate linkage
  modified_base 128: mod_base = OTHER; note = 2'-O-methyl modified nucleotide with phosphorothioate linkage
  modified_base 129: mod_base = OTHER; note = 2'-O-methyl modified nucleotide with phosphorothioate linkage
  modified_base 130: mod_base = OTHER; note = 2'-O-methyl modified nucleotide
gagaatcaaaatcggtgaatgttttagagctagaaatagcaagttaaaataaggctagtccgttatcaacttgaaaaagtggcaccgagtcggtgcagtctgtctgccttagtgattcaccgattttgat

SEQ ID NO: 16194 - RNA, 129 nt, synthetic construct
  source 1..129: mol_type = other RNA
  modified_base 1: mod_base = OTHER; note = 2'-O-methyl modified nucleotide with phosphorothioate linkage
  modified_base 2: mod_base = OTHER; note = 2'-O-methyl modified nucleotide with phosphorothioate linkage
  modified_base 3: mod_base = OTHER; note = 2'-O-methyl modified nucleotide with phosphorothioate linkage
  modified_base 29: mod_base = OTHER; note = 2'-O-methyl modified nucleotide
  modified_base 30: mod_base = OTHER; note = 2'-O-methyl modified nucleotide
  modified_base 31: mod_base = OTHER; note = 2'-O-methyl modified nucleotide
  modified_base 32: mod_base = OTHER; note = 2'-O-methyl modified nucleotide
  modified_base 33: mod_base = OTHER; note = 2'-O-methyl modified nucleotide
  modified_base 34: mod_base = OTHER; note = 2'-O-methyl modified nucleotide
  modified_base 35: mod_base = OTHER; note = 2'-O-methyl modified nucleotide
  modified_base 36: mod_base = OTHER; note = 2'-O-methyl modified nucleotide
  modified_base 37: mod_base = OTHER; note = 2'-O-methyl modified nucleotide
  modified_base 38: mod_base = OTHER; note = 2'-O-methyl modified nucleotide
  modified_base 39: mod_base = OTHER; note = 2'-O-methyl modified nucleotide
  modified_base 40: mod_base = OTHER; note = 2'-O-methyl modified nucleotide
  modified_base 69: mod_base = OTHER; note = 2'-O-methyl modified nucleotide
  modified_base 70: mod_base = OTHER; note = 2'-O-methyl modified nucleotide
  modified_base 71: mod_base = OTHER; note = 2'-O-methyl modified nucleotide
  modified_base 72: mod_base = OTHER; note = 2'-O-methyl modified nucleotide
  modified_base 73: mod_base = OTHER; note = 2'-O-methyl modified nucleotide
  modified_base 74: mod_base = OTHER; note = 2'-O-methyl modified nucleotide
  modified_base 75: mod_base = OTHER; note = 2'-O-methyl modified nucleotide
  modified_base 76: mod_base = OTHER; note = 2'-O-methyl modified nucleotide
  modified_base 77: mod_base = OTHER; note = 2'-O-methyl modified nucleotide
  modified_base 78: mod_base = OTHER; note = 2'-O-methyl modified nucleotide
  modified_base 79: mod_base = OTHER; note = 2'-O-methyl modified nucleotide
  modified_base 80: mod_base = OTHER; note = 2'-O-methyl modified nucleotide
  modified_base 81: mod_base = OTHER; note = 2'-O-methyl modified nucleotide
  modified_base 82: mod_base = OTHER; note = 2'-O-methyl modified nucleotide
  modified_base 83: mod_base = OTHER; note = 2'-O-methyl modified nucleotide
  modified_base 84: mod_base = OTHER; note = 2'-O-methyl modified nucleotide
  modified_base 85: mod_base = OTHER; note = 2'-O-methyl modified nucleotide
  modified_base 86: mod_base = OTHER; note = 2'-O-methyl modified nucleotide
  modified_base 87: mod_base = OTHER; note = 2'-O-methyl modified nucleotide
  modified_base 88: mod_base = OTHER; note = 2'-O-methyl modified nucleotide
  modified_base 89: mod_base = OTHER; note = 2'-O-methyl modified nucleotide
  modified_base 90: mod_base = OTHER; note = 2'-O-methyl modified nucleotide
  modified_base 91: mod_base = OTHER; note = 2'-O-methyl modified nucleotide
  modified_base 92: mod_base = OTHER; note = 2'-O-methyl modified nucleotide
  modified_base 93: mod_base = OTHER; note = 2'-O-methyl modified nucleotide
  modified_base 94: mod_base = OTHER; note = 2'-O-methyl modified nucleotide
  modified_base 95: mod_base = OTHER; note = 2'-O-methyl modified nucleotide
  modified_base 96: mod_base = OTHER; note = 2'-O-methyl modified nucleotide
  modified_base 126: mod_base = OTHER; note = Nucleotide with phosphorothioate linkage
  modified_base 127: mod_base = OTHER; note = 2'-O-methyl modified nucleotide with phosphorothioate linkage
  modified_base 128: mod_base = OTHER; note = 2'-O-methyl modified nucleotide with phosphorothioate linkage
  modified_base 129: mod_base = OTHER; note = 2'-O-methyl modified nucleotide
gagaatcaaaatcggtgaatgttttagagctagaaatagcaagttaaaataaggctagtccgttatcaacttgaaaaagtggcaccgagtcggtgcagtctgtctgccttagtgattcaccgattttga

SEQ ID NO: 16195 - RNA, 128 nt, synthetic construct
  source 1..128: mol_type = other RNA
  modified_base 1: mod_base = OTHER; note = 2'-O-methyl modified nucleotide with phosphorothioate linkage
  modified_base 2: mod_base = OTHER; note = 2'-O-methyl modified nucleotide with phosphorothioate linkage
  modified_base 3: mod_base = OTHER; note = 2'-O-methyl modified nucleotide with phosphorothioate linkage
  modified_base 29: mod_base = OTHER; note = 2'-O-methyl modified nucleotide
  modified_base 30: mod_base = OTHER; note = 2'-O-methyl modified nucleotide
  modified_base 31: mod_base = OTHER; note = 2'-O-methyl modified nucleotide
  modified_base 32: mod_base = OTHER; note = 2'-O-methyl modified nucleotide
  modified_base 33: mod_base = OTHER; note = 2'-O-methyl modified nucleotide
  modified_base 34: mod_base = OTHER; note = 2'-O-methyl modified nucleotide
  modified_base 35: mod_base = OTHER; note = 2'-O-methyl modified nucleotide
  modified_base 36: mod_base = OTHER; note = 2'-O-methyl modified nucleotide
  modified_base 37: mod_base = OTHER; note = 2'-O-methyl modified nucleotide
  modified_base 38: mod_base = OTHER; note = 2'-O-methyl modified nucleotide
  modified_base 39: mod_base = OTHER; note = 2'-O-methyl modified nucleotide
  modified_base 40: mod_base = OTHER; note = 2'-O-methyl modified nucleotide
  modified_base 69: mod_base = OTHER; note = 2'-O-methyl modified nucleotide
  modified_base 70: mod_base = OTHER; note = 2'-O-methyl modified nucleotide
  modified_base 71: mod_base = OTHER; note = 2'-O-methyl modified nucleotide
  modified_base 72: mod_base = OTHER; note = 2'-O-methyl modified nucleotide
  modified_base 73: mod_base = OTHER; note = 2'-O-methyl modified nucleotide
  modified_base 74: mod_base = OTHER; note = 2'-O-methyl modified nucleotide
  modified_base 75: mod_base = OTHER; note = 2'-O-methyl modified nucleotide
  modified_base 76: mod_base = OTHER; note = 2'-O-methyl modified nucleotide
  modified_base 77: mod_base = OTHER; note = 2'-O-methyl modified nucleotide
  modified_base 78: mod_base = OTHER; note = 2'-O-methyl modified nucleotide
  modified_base 79: mod_base = OTHER; note = 2'-O-methyl modified nucleotide
  modified_base 80: mod_base = OTHER; note = 2'-O-methyl modified nucleotide
  modified_base 81: mod_base = OTHER; note = 2'-O-methyl modified nucleotide
  modified_base 82: mod_base = OTHER; note = 2'-O-methyl modified nucleotide
  modified_base 83: mod_base = OTHER; note = 2'-O-methyl modified nucleotide
  modified_base 84: mod_base = OTHER; note = 2'-O-methyl modified nucleotide
  modified_base 85: mod_base = OTHER; note = 2'-O-methyl modified nucleotide
  modified_base 86: mod_base = OTHER; note = 2'-O-methyl modified nucleotide
  modified_base 87: mod_base = OTHER; note = 2'-O-methyl modified nucleotide
  modified_base 88: mod_base = OTHER; note = 2'-O-methyl modified nucleotide
  modified_base 89: mod_base = OTHER; note = 2'-O-methyl modified nucleotide
  modified_base 90: mod_base = OTHER; note = 2'-O-methyl modified nucleotide
  modified_base 91: mod_base = OTHER; note = 2'-O-methyl modified nucleotide
  modified_base 92: mod_base = OTHER; note = 2'-O-methyl modified nucleotide
  modified_base 93: mod_base = OTHER; note = 2'-O-methyl modified nucleotide
  modified_base 94: mod_base = OTHER; note = 2'-O-methyl modified nucleotide
  modified_base 95: mod_base = OTHER; note = 2'-O-methyl modified nucleotide
  modified_base 96: mod_base = OTHER; note = 2'-O-methyl modified nucleotide
  modified_base 125: mod_base = OTHER; note = Nucleotide with phosphorothioate linkage
  modified_base 126: mod_base = OTHER; note = 2'-O-methyl modified nucleotide with phosphorothioate linkage
  modified_base 127: mod_base = OTHER; note = 2'-O-methyl modified nucleotide with phosphorothioate linkage
  modified_base 128: mod_base = OTHER; note = 2'-O-methyl modified nucleotide
gagaatcaaaatcggtgaatgttttagagctagaaatagcaagttaaaataaggctagtccgttatcaacttgaaaaagtggcaccgagtcggtgcagtctgtctgccttagtgattcaccgattttg

SEQ ID NO: 16196 - RNA, 127 nt, synthetic construct
  source 1..127: mol_type = other RNA
  modified_base 1: mod_base = OTHER; note = 2'-O-methyl modified nucleotide with phosphorothioate linkage
  modified_base 2: mod_base = OTHER; note = 2'-O-methyl modified nucleotide with phosphorothioate linkage
  modified_base 3: mod_base = OTHER; note = 2'-O-methyl modified nucleotide with phosphorothioate linkage
  modified_base 29: mod_base = OTHER; note = 2'-O-methyl modified nucleotide
  modified_base 30: mod_base = OTHER; note = 2'-O-methyl modified nucleotide
  modified_base 31: mod_base = OTHER; note = 2'-O-methyl modified nucleotide
  modified_base 32: mod_base = OTHER; note = 2'-O-methyl modified nucleotide
  modified_base 33: mod_base = OTHER; note = 2'-O-methyl modified nucleotide
  modified_base 34: mod_base = OTHER; note = 2'-O-methyl modified nucleotide
  modified_base 35: mod_base = OTHER; note = 2'-O-methyl modified nucleotide
  modified_base 36: mod_base = OTHER; note = 2'-O-methyl modified nucleotide
  modified_base 37: mod_base = OTHER; note = 2'-O-methyl modified nucleotide
  modified_base 38: mod_base = OTHER; note = 2'-O-methyl modified nucleotide
  modified_base 39: mod_base = OTHER; note = 2'-O-methyl modified nucleotide
  modified_base 40: mod_base = OTHER; note = 2'-O-methyl modified nucleotide
  modified_base 69: mod_base = OTHER; note = 2'-O-methyl modified nucleotide
  modified_base 70: mod_base = OTHER; note = 2'-O-methyl modified nucleotide
  modified_base 71: mod_base = OTHER; note = 2'-O-methyl modified nucleotide
  modified_base 72: mod_base = OTHER; note = 2'-O-methyl modified nucleotide
  modified_base 73: mod_base = OTHER; note = 2'-O-methyl modified nucleotide
  modified_base 74: mod_base = OTHER; note = 2'-O-methyl modified nucleotide
  modified_base 75: mod_base = OTHER; note = 2'-O-methyl modified nucleotide
  modified_base 76: mod_base = OTHER; note = 2'-O-methyl modified nucleotide
  modified_base 77: mod_base = OTHER; note = 2'-O-methyl modified nucleotide
  modified_base 78: mod_base = OTHER; note = 2'-O-methyl modified nucleotide
  modified_base 79: mod_base = OTHER; note = 2'-O-methyl modified nucleotide
  modified_base 80: mod_base = OTHER; note = 2'-O-methyl modified nucleotide
  modified_base 81: mod_base = OTHER; note = 2'-O-methyl modified nucleotide
  modified_base 82: mod_base = OTHER; note = 2'-O-methyl modified nucleotide
  modified_base 83: mod_base = OTHER; note = 2'-O-methyl modified nucleotide
  modified_base 84: mod_base = OTHER; note = 2'-O-methyl modified nucleotide
  modified_base 85: mod_base = OTHER; note = 2'-O-methyl modified nucleotide
  modified_base 86: mod_base = OTHER; note = 2'-O-methyl modified nucleotide
  modified_base 87: mod_base = OTHER; note = 2'-O-methyl modified nucleotide
  modified_base 88: mod_base = OTHER; note = 2'-O-methyl modified nucleotide
  modified_base 89: mod_base = OTHER; note = 2'-O-methyl modified nucleotide
  modified_base 90: mod_base = OTHER; note = 2'-O-methyl modified nucleotide
  modified_base 91: mod_base = OTHER; note = 2'-O-methyl modified nucleotide
  modified_base 92: mod_base = OTHER; note = 2'-O-methyl modified nucleotide
  modified_base 93: mod_base = OTHER; note = 2'-O-methyl modified nucleotide
  modified_base 94: mod_base = OTHER; note = 2'-O-methyl modified nucleotide
  modified_base 95: mod_base = OTHER; note = 2'-O-methyl modified nucleotide
  modified_base 96: mod_base = OTHER; note = 2'-O-methyl modified nucleotide
  modified_base 124: mod_base = OTHER; note = Nucleotide with phosphorothioate linkage
  modified_base 125: mod_base = OTHER; note = 2'-O-methyl modified nucleotide with phosphorothioate linkage
  modified_base 126: mod_base = OTHER; note = 2'-O-methyl modified nucleotide with phosphorothioate linkage
  modified_base 127: mod_base = OTHER; note = 2'-O-methyl modified nucleotide
gagaatcaaaatcggtgaatgttttagagctagaaatagcaagttaaaataaggctagtccgttatcaacttgaaaaagtggcaccgagtcggtgcagtctgtctgccttagtgattcaccgatttt

SEQ ID NO: 16197 - RNA, 126 nt, synthetic construct
  source 1..126: mol_type = other RNA
  modified_base 1: mod_base = OTHER; note = 2'-O-methyl modified nucleotide with phosphorothioate linkage
  modified_base 2: mod_base = OTHER; note = 2'-O-methyl modified nucleotide with phosphorothioate linkage
  modified_base 3: mod_base = OTHER; note = 2'-O-methyl modified nucleotide with phosphorothioate linkage
  modified_base 29: mod_base = OTHER; note = 2'-O-methyl modified nucleotide
  modified_base 30: mod_base = OTHER; note = 2'-O-methyl modified nucleotide
  modified_base 31: mod_base = OTHER; note = 2'-O-methyl modified nucleotide
  modified_base 32: mod_base = OTHER; note = 2'-O-methyl modified nucleotide
  modified_base 33: mod_base = OTHER; note = 2'-O-methyl modified nucleotide
  modified_base 34: mod_base = OTHER; note = 2'-O-methyl modified nucleotide
  modified_base 35: mod_base = OTHER; note = 2'-O-methyl modified nucleotide
  modified_base 36: mod_base = OTHER; note = 2'-O-methyl modified nucleotide
  modified_base 37: mod_base = OTHER; note = 2'-O-methyl modified nucleotide
  modified_base 38: mod_base = OTHER; note = 2'-O-methyl modified nucleotide
  modified_base 39: mod_base = OTHER; note = 2'-O-methyl modified nucleotide
  modified_base 40: mod_base = OTHER; note = 2'-O-methyl modified nucleotide
  modified_base 69: mod_base = OTHER; note = 2'-O-methyl modified nucleotide
  modified_base 70: mod_base = OTHER; note = 2'-O-methyl modified nucleotide
  modified_base 71: mod_base = OTHER; note = 2'-O-methyl modified nucleotide
  modified_base 72: mod_base = OTHER; note = 2'-O-methyl modified nucleotide
  modified_base 73: mod_base = OTHER; note = 2'-O-methyl modified nucleotide
  modified_base 74: mod_base = OTHER; note = 2'-O-methyl modified nucleotide
  modified_base 75: mod_base = OTHER; note = 2'-O-methyl modified nucleotide
  modified_base 76: mod_base = OTHER; note = 2'-O-methyl modified nucleotide
  modified_base 77: mod_base = OTHER; note = 2'-O-methyl modified nucleotide
  modified_base 78: mod_base = OTHER; note = 2'-O-methyl modified nucleotide
  modified_base 79: mod_base = OTHER; note = 2'-O-methyl modified nucleotide
  modified_base 80: mod_base = OTHER; note = 2'-O-methyl modified nucleotide
  modified_base 81: mod_base = OTHER; note = 2'-O-methyl modified nucleotide
  modified_base 82: mod_base = OTHER; note = 2'-O-methyl modified nucleotide
  modified_base 83: mod_base = OTHER; note = 2'-O-methyl modified nucleotide
  modified_base 84: mod_base = OTHER; note = 2'-O-methyl modified nucleotide
  modified_base 85: mod_base = OTHER; note = 2'-O-methyl modified nucleotide
  modified_base 86: mod_base = OTHER; note = 2'-O-methyl modified nucleotide
  modified_base 87: mod_base = OTHER; note = 2'-O-methyl modified nucleotide
  modified_base 88: mod_base = OTHER; note = 2'-O-methyl modified nucleotide
  modified_base 89: mod_base = OTHER; note = 2'-O-methyl modified nucleotide
  modified_base 90: mod_base = OTHER; note = 2'-O-methyl modified nucleotide
  modified_base 91: mod_base = OTHER; note = 2'-O-methyl modified nucleotide
  modified_base 92: mod_base = OTHER; note = 2'-O-methyl modified nucleotide
  modified_base 93: mod_base = OTHER; note = 2'-O-methyl modified nucleotide
  modified_base 94: mod_base = OTHER; note = 2'-O-methyl modified nucleotide
  modified_base 95: mod_base = OTHER; note = 2'-O-methyl modified nucleotide
  modified_base 96: mod_base = OTHER; note = 2'-O-methyl modified nucleotide
  modified_base 123: mod_base = OTHER; note = Nucleotide with phosphorothioate linkage
  modified_base 124: mod_base = OTHER; note = 2'-O-methyl modified nucleotide with phosphorothioate linkage
  modified_base 125: mod_base = OTHER; note = 2'-O-methyl modified nucleotide with phosphorothioate linkage
  modified_base 126: mod_base = OTHER; note = 2'-O-methyl modified nucleotide
gagaatcaaaatcggtgaatgttttagagctagaaatagcaagttaaaataaggctagtccgttatcaacttgaaaaagtggcaccgagtcggtgcagtctgtctgccttagtgattcaccgattt

SEQ ID NO: 16198 - RNA, 125 nt, synthetic construct
  source 1..125: mol_type = other RNA
  modified_base 1: mod_base = OTHER; note = 2'-O-methyl modified nucleotide with phosphorothioate linkage
  modified_base 2: mod_base = OTHER; note = 2'-O-methyl modified nucleotide with phosphorothioate linkage
  modified_base 3: mod_base = OTHER; note = 2'-O-methyl modified nucleotide with phosphorothioate linkage
  modified_base 29: mod_base = OTHER; note = 2'-O-methyl modified nucleotide
  modified_base 30: mod_base = OTHER; note = 2'-O-methyl modified nucleotide
  modified_base 31: mod_base = OTHER; note = 2'-O-methyl modified nucleotide
  modified_base 32: mod_base = OTHER; note = 2'-O-methyl modified nucleotide
  modified_base 33: mod_base = OTHER; note = 2'-O-methyl modified nucleotide
  modified_base 34: mod_base = OTHER; note = 2'-O-methyl modified nucleotide
  modified_base 35: mod_base = OTHER; note = 2'-O-methyl modified nucleotide
  modified_base 36: mod_base = OTHER; note = 2'-O-methyl modified nucleotide
  modified_base 37: mod_base = OTHER; note = 2'-O-methyl modified nucleotide
  modified_base 38: mod_base = OTHER; note = 2'-O-methyl modified nucleotide
  modified_base 39: mod_base = OTHER; note = 2'-O-methyl modified nucleotide
  modified_base 40: mod_base = OTHER; note = 2'-O-methyl modified nucleotide
  modified_base 69: mod_base = OTHER; note = 2'-O-methyl modified nucleotide
  modified_base 70: mod_base = OTHER; note = 2'-O-methyl modified nucleotide
  modified_base 71: mod_base = OTHER; note = 2'-O-methyl modified nucleotide
  modified_base 72: mod_base = OTHER; note = 2'-O-methyl modified nucleotide
  modified_base 73: mod_base = OTHER; note = 2'-O-methyl modified nucleotide
  modified_base 74: mod_base = OTHER; note = 2'-O-methyl modified nucleotide
  modified_base 75: mod_base = OTHER; note = 2'-O-methyl modified nucleotide
  modified_base 76: mod_base = OTHER; note = 2'-O-methyl modified nucleotide
  modified_base 77: mod_base = OTHER; note = 2'-O-methyl modified nucleotide
  modified_base 78: mod_base = OTHER; note = 2'-O-methyl modified nucleotide
  modified_base 79: mod_base = OTHER; note = 2'-O-methyl modified nucleotide
  modified_base 80: mod_base = OTHER; note = 2'-O-methyl modified nucleotide
  modified_base 81: mod_base = OTHER; note = 2'-O-methyl modified nucleotide
  modified_base 82: mod_base = OTHER; note = 2'-O-methyl modified nucleotide
  modified_base 83: mod_base = OTHER; note = 2'-O-methyl modified nucleotide
  modified_base 84: mod_base = OTHER; note = 2'-O-methyl modified nucleotide
  modified_base 85: mod_base = OTHER; note = 2'-O-methyl modified nucleotide
  modified_base 86: mod_base = OTHER; note = 2'-O-methyl modified nucleotide
  modified_base 87: mod_base = OTHER; note = 2'-O-methyl modified nucleotide
  modified_base 88: mod_base = OTHER; note = 2'-O-methyl modified nucleotide
  modified_base 89: mod_base = OTHER; note = 2'-O-methyl modified nucleotide
  modified_base 90: mod_base = OTHER; note = 2'-O-methyl modified nucleotide
  modified_base 91: mod_base = OTHER; note = 2'-O-methyl modified nucleotide
  modified_base 92: mod_base = OTHER; note = 2'-O-methyl modified nucleotide
  modified_base 93: mod_base = OTHER; note = 2'-O-methyl modified nucleotide
  modified_base 94: mod_base = OTHER; note = 2'-O-methyl modified nucleotide
  modified_base 95: mod_base = OTHER; note = 2'-O-methyl modified nucleotide
  modified_base 96: mod_base = OTHER; note = 2'-O-methyl modified nucleotide
  modified_base 122: mod_base = OTHER; note = Nucleotide with phosphorothioate linkage
  modified_base 123: mod_base = OTHER; note = 2'-O-methyl modified nucleotide with phosphorothioate linkage
  modified_base 124: mod_base = OTHER; note = 2'-O-methyl modified nucleotide with phosphorothioate linkage
  modified_base 125: mod_base = OTHER; note = 2'-O-methyl modified nucleotide
gagaatcaaaatcggtgaatgttttagagctagaaatagcaagttaaaataaggctagtccgttatcaacttgaaaaagtggcaccgagtcggtgcagtctgtctgccttagtgattcaccgatt

SEQ ID NO: 16199 - RNA, 132 nt, synthetic construct
  source 1..132: mol_type = other RNA
  modified_base 1: mod_base = OTHER; note = 2'-O-methyl modified nucleotide with phosphorothioate linkage
  modified_base 2: mod_base = OTHER; note = 2'-O-methyl modified nucleotide with phosphorothioate linkage
  modified_base 3: mod_base = OTHER; note = 2'-O-methyl modified nucleotide with phosphorothioate linkage
  modified_base 29: mod_base = OTHER; note = 2'-O-methyl modified nucleotide
  modified_base 30: mod_base = OTHER; note = 2'-O-methyl modified nucleotide
  modified_base 31: mod_base = OTHER; note = 2'-O-methyl modified nucleotide
  modified_base 32: mod_base = OTHER; note = 2'-O-methyl modified nucleotide
  modified_base 33: mod_base = OTHER; note = 2'-O-methyl modified nucleotide
  modified_base 34: mod_base = OTHER; note = 2'-O-methyl modified nucleotide
  modified_base 35: mod_base = OTHER; note = 2'-O-methyl modified nucleotide
  modified_base 36: mod_base = OTHER; note = 2'-O-methyl modified nucleotide
  modified_base 37: mod_base = OTHER; note = 2'-O-methyl modified nucleotide
  modified_base 38: mod_base = OTHER; note = 2'-O-methyl modified nucleotide
  modified_base 39: mod_base = OTHER; note = 2'-O-methyl modified nucleotide
  modified_base 40: mod_base = OTHER; note = 2'-O-methyl modified nucleotide
  modified_base 69: mod_base = OTHER; note = 2'-O-methyl modified nucleotide
  modified_base 70: mod_base = OTHER; note = 2'-O-methyl modified nucleotide
  modified_base 71: mod_base = OTHER; note = 2'-O-methyl modified nucleotide
  modified_base 72: mod_base = OTHER; note = 2'-O-methyl modified nucleotide
  modified_base 73: mod_base = OTHER; note = 2'-O-methyl modified nucleotide
  modified_base 74: mod_base = OTHER; note = 2'-O-methyl modified nucleotide
  modified_base 75: mod_base = OTHER; note = 2'-O-methyl modified nucleotide
  modified_base 76: mod_base = OTHER; note = 2'-O-methyl modified nucleotide
  modified_base 77: mod_base = OTHER; note = 2'-O-methyl modified nucleotide
  modified_base 78: mod_base = OTHER; note = 2'-O-methyl modified nucleotide
  modified_base 79: mod_base = OTHER; note = 2'-O-methyl modified nucleotide
  modified_base 80: mod_base = OTHER; note = 2'-O-methyl modified nucleotide
  modified_base 81: mod_base = OTHER; note = 2'-O-methyl modified nucleotide
  modified_base 82: mod_base = OTHER; note = 2'-O-methyl modified nucleotide
  modified_base 83: mod_base = OTHER; note = 2'-O-methyl modified nucleotide
  modified_base 84: mod_base = OTHER; note = 2'-O-methyl modified nucleotide
  modified_base 85: mod_base = OTHER; note = 2'-O-methyl modified nucleotide
  modified_base 86: mod_base = OTHER; note = 2'-O-methyl modified nucleotide
  modified_base 87: mod_base = OTHER; note = 2'-O-methyl modified nucleotide
  modified_base 88: mod_base = OTHER; note = 2'-O-methyl modified nucleotide
  modified_base 89: mod_base = OTHER; note = 2'-O-methyl modified nucleotide
  modified_base 90: mod_base = OTHER; note = 2'-O-methyl modified nucleotide
  modified_base 91: mod_base = OTHER; note = 2'-O-methyl modified nucleotide
  modified_base 92: mod_base = OTHER; note = 2'-O-methyl modified nucleotide
  modified_base 93: mod_base = OTHER; note = 2'-O-methyl modified nucleotide
  modified_base 94: mod_base = OTHER; note = 2'-O-methyl modified nucleotide
  modified_base 95: mod_base = OTHER; note = 2'-O-methyl modified nucleotide
  modified_base 96: mod_base = OTHER; note = 2'-O-methyl modified nucleotide
  modified_base 129: mod_base = OTHER; note = Nucleotide with phosphorothioate linkage
  modified_base 130: mod_base = OTHER; note = 2'-O-methyl modified nucleotide with phosphorothioate linkage
  modified_base 131: mod_base = OTHER; note = 2'-O-methyl modified nucleotide with phosphorothioate linkage
  modified_base 132: mod_base = OTHER; note = 2'-O-methyl modified nucleotide
gagaatcaaaatcggtgaatgttttagagctagaaatagcaagttaaaataaggctagtccgttatcaacttgaaaaagtggcaccgagtcggtgccaagtctgtctgccttagtgattcaccgattttgat

SEQ ID NO: 16200 - RNA, 131 nt, synthetic construct
  source 1..131: mol_type = other RNA
  modified_base 1: mod_base = OTHER; note = 2'-O-methyl modified nucleotide with phosphorothioate linkage
  modified_base 2: mod_base = OTHER; note = 2'-O-methyl modified nucleotide with phosphorothioate linkage
  modified_base 3: mod_base = OTHER; note = 2'-O-methyl modified nucleotide with phosphorothioate linkage
  modified_base 29: mod_base = OTHER; note = 2'-O-methyl modified nucleotide
  modified_base 30: mod_base = OTHER; note = 2'-O-methyl modified nucleotide
  modified_base 31: mod_base = OTHER; note = 2'-O-methyl modified nucleotide
  modified_base 32: mod_base = OTHER; note = 2'-O-methyl modified nucleotide
  modified_base 33: mod_base = OTHER; note = 2'-O-methyl modified nucleotide
  modified_base 34: mod_base = OTHER; note = 2'-O-methyl modified nucleotide
  modified_base 35: mod_base = OTHER; note = 2'-O-methyl modified nucleotide
  modified_base 36: mod_base = OTHER; note = 2'-O-methyl modified nucleotide
  modified_base 37: mod_base = OTHER; note = 2'-O-methyl modified nucleotide
  modified_base 38: mod_base = OTHER; note = 2'-O-methyl modified nucleotide
  modified_base 39: mod_base = OTHER; note = 2'-O-methyl modified nucleotide
  modified_base 40: mod_base = OTHER; note = 2'-O-methyl modified nucleotide
  modified_base 69: mod_base = OTHER; note = 2'-O-methyl modified nucleotide
  modified_base 70: mod_base = OTHER; note = 2'-O-methyl modified nucleotide
  modified_base 71: mod_base = OTHER; note = 2'-O-methyl modified nucleotide
  modified_base 72: mod_base = OTHER; note = 2'-O-methyl modified nucleotide
  modified_base 73: mod_base = OTHER; note = 2'-O-methyl modified nucleotide
  modified_base 74: mod_base = OTHER; note = 2'-O-methyl modified nucleotide
  modified_base 75: mod_base = OTHER; note = 2'-O-methyl modified nucleotide
  modified_base 76: mod_base = OTHER; note = 2'-O-methyl modified nucleotide
  modified_base 77: mod_base = OTHER; note = 2'-O-methyl modified nucleotide
  modified_base 78: mod_base = OTHER; note = 2'-O-methyl modified nucleotide
  modified_base 79: mod_base = OTHER; note = 2'-O-methyl modified nucleotide
  modified_base 80: mod_base = OTHER; note = 2'-O-methyl modified nucleotide
  modified_base 81: mod_base = OTHER; note = 2'-O-methyl modified nucleotide
  modified_base 82: mod_base = OTHER; note = 2'-O-methyl modified nucleotide
  modified_base 83: mod_base = OTHER; note = 2'-O-methyl modified nucleotide
  modified_base 84: mod_base = OTHER; note = 2'-O-methyl modified nucleotide
  modified_base 85: mod_base = OTHER; note = 2'-O-methyl modified nucleotide
  modified_base 86: mod_base = OTHER; note = 2'-O-methyl modified nucleotide
  modified_base 87: mod_base = OTHER; note = 2'-O-methyl modified nucleotide
  modified_base 88: mod_base = OTHER; note = 2'-O-methyl modified nucleotide
  modified_base 89: mod_base = OTHER; note = 2'-O-methyl modified nucleotide
  modified_base 90: mod_base = OTHER; note = 2'-O-methyl modified nucleotide
  modified_base 91: mod_base = OTHER; note = 2'-O-methyl modified nucleotide
  modified_base 92: mod_base = OTHER; note = 2'-O-methyl modified nucleotide
  modified_base 93: mod_base = OTHER; note = 2'-O-methyl modified nucleotide
  modified_base 94: mod_base = OTHER; note = 2'-O-methyl modified nucleotide
  modified_base 95: mod_base = OTHER; note = 2'-O-methyl modified nucleotide
  modified_base 96: mod_base = OTHER; note = 2'-O-methyl modified nucleotide
  modified_base 128: mod_base = OTHER; note = Nucleotide with phosphorothioate linkage
  modified_base 129: mod_base = OTHER; note = 2'-O-methyl modified nucleotide with phosphorothioate linkage
  modified_base 130: mod_base = OTHER; note = 2'-O-methyl modified nucleotide with phosphorothioate linkage
  modified_base 131: mod_base = OTHER; note = 2'-O-methyl modified nucleotide
gagaatcaaaatcggtgaatgttttagagctagaaatagcaagttaaaataaggctagtccgttatcaacttgaaaaagtggcaccgagtcggtgccaagtctgtctgccttagtgattcaccgattttga

SEQ ID NO: 16201 - RNA, 130 nt, synthetic construct
  source 1..130: mol_type = other RNA
  modified_base 1: mod_base = OTHER; note = 2'-O-methyl modified nucleotide with phosphorothioate linkage
  modified_base 2: mod_base = OTHER; note = 2'-O-methyl modified nucleotide with phosphorothioate linkage
  modified_base 3: mod_base = OTHER; note = 2'-O-methyl modified nucleotide with phosphorothioate linkage
  modified_base 29: mod_base = OTHER; note = 2'-O-methyl modified nucleotide
  modified_base 30: mod_base = OTHER; note = 2'-O-methyl modified nucleotide
  modified_base 31: mod_base = OTHER; note = 2'-O-methyl modified nucleotide
  modified_base 32: mod_base = OTHER; note = 2'-O-methyl modified nucleotide
  modified_base 33: mod_base = OTHER; note = 2'-O-methyl modified nucleotide
  modified_base 34: mod_base = OTHER; note = 2'-O-methyl modified nucleotide
  modified_base 35: mod_base = OTHER; note = 2'-O-methyl modified nucleotide
  modified_base 36: mod_base = OTHER; note = 2'-O-methyl modified nucleotide
  modified_base 37: mod_base = OTHER; note = 2'-O-methyl modified nucleotide
  modified_base 38: mod_base = OTHER; note = 2'-O-methyl modified nucleotide
  modified_base 39: mod_base = OTHER; note = 2'-O-methyl modified nucleotide
  modified_base 40: mod_base = OTHER; note = 2'-O-methyl modified nucleotide
  modified_base 69: mod_base = OTHER; note = 2'-O-methyl modified nucleotide
  modified_base 70: mod_base = OTHER; note = 2'-O-methyl modified nucleotide
  modified_base 71: mod_base = OTHER; note = 2'-O-methyl modified nucleotide
  modified_base 72: mod_base = OTHER; note = 2'-O-methyl modified nucleotide
  modified_base 73: mod_base = OTHER; note = 2'-O-methyl modified nucleotide
  modified_base 74: mod_base = OTHER; note = 2'-O-methyl modified nucleotide
  modified_base 75: mod_base = OTHER; note = 2'-O-methyl modified nucleotide
  modified_base 76: mod_base = OTHER; note = 2'-O-methyl modified nucleotide
  modified_base 77: mod_base = OTHER; note = 2'-O-methyl modified nucleotide
  modified_base 78: mod_base = OTHER; note = 2'-O-methyl modified nucleotide
  modified_base 79: mod_base = OTHER; note = 2'-O-methyl modified nucleotide
  modified_base 80: mod_base = OTHER; note = 2'-O-methyl modified nucleotide
  modified_base 81: mod_base = OTHER; note = 2'-O-methyl modified nucleotide
  modified_base 82: mod_base = OTHER; note = 2'-O-methyl modified nucleotide
  modified_base 83: mod_base = OTHER; note = 2'-O-methyl modified nucleotide
  modified_base 84: mod_base = OTHER; note = 2'-O-methyl modified nucleotide
  modified_base 85: mod_base = OTHER; note = 2'-O-methyl modified nucleotide
  modified_base 86: mod_base = OTHER; note = 2'-O-methyl modified nucleotide
  modified_base 87: mod_base = OTHER; note = 2'-O-methyl modified nucleotide
  modified_base 88: mod_base = OTHER; note = 2'-O-methyl modified nucleotide
  modified_base 89: mod_base = OTHER; note = 2'-O-methyl modified nucleotide
  modified_base 90: mod_base = OTHER; note = 2'-O-methyl modified nucleotide
  modified_base 91: mod_base = OTHER; note = 2'-O-methyl modified nucleotide
  modified_base 92: mod_base = OTHER; note = 2'-O-methyl modified nucleotide
  modified_base 93: mod_base = OTHER; note = 2'-O-methyl modified nucleotide
  modified_base 94: mod_base = OTHER; note = 2'-O-methyl modified nucleotide
  modified_base 95: mod_base = OTHER; note = 2'-O-methyl modified nucleotide
  modified_base 96: mod_base = OTHER; note = 2'-O-methyl modified nucleotide
  modified_base 127: mod_base = OTHER; note = Nucleotide with phosphorothioate linkage
  modified_base 128: mod_base = OTHER; note = 2'-O-methyl modified nucleotide with phosphorothioate linkage
  modified_base 129: mod_base = OTHER; note = 2'-O-methyl modified nucleotide with phosphorothioate linkage
  modified_base 130: mod_base = OTHER; note = 2'-O-methyl modified nucleotide
gagaatcaaaatcggtgaatgttttagagctagaaatagcaagttaaaataaggctagtccgttatcaacttgaaaaagtggcaccgagtcggtgccaagtctgtctgccttagtgattcaccgattttg

SEQ ID NO: 16202 - RNA, 129 nt, synthetic construct
  source 1..129: mol_type = other RNA
  modified_base 1: mod_base = OTHER; note = 2'-O-methyl modified nucleotide with phosphorothioate linkage
  modified_base 2: mod_base = OTHER; note = 2'-O-methyl modified nucleotide with phosphorothioate linkage
  modified_base 3: mod_base = OTHER; note = 2'-O-methyl modified nucleotide with phosphorothioate linkage
  modified_base 29: mod_base = OTHER; note = 2'-O-methyl modified nucleotide
  modified_base 30: mod_base = OTHER; note = 2'-O-methyl modified nucleotide
  modified_base 31: mod_base = OTHER; note = 2'-O-methyl modified nucleotide
  modified_base 32: mod_base = OTHER; note = 2'-O-methyl modified nucleotide
  modified_base 33: mod_base = OTHER; note = 2'-O-methyl modified nucleotide
  modified_base 34: mod_base = OTHER; note = 2'-O-methyl modified nucleotide
  modified_base 35: mod_base = OTHER; note = 2'-O-methyl modified nucleotide
  modified_base 36: mod_base = OTHER; note = 2'-O-methyl modified nucleotide
  modified_base 37: mod_base = OTHER; note = 2'-O-methyl modified nucleotide
  modified_base 38: mod_base = OTHER; note = 2'-O-methyl modified nucleotide
  modified_base 39: mod_base = OTHER; note = 2'-O-methyl modified nucleotide
  modified_base 40: mod_base = OTHER; note = 2'-O-methyl modified nucleotide
  modified_base 69: mod_base = OTHER; note = 2'-O-methyl modified nucleotide
  modified_base 70: mod_base = OTHER; note = 2'-O-methyl modified nucleotide
  modified_base 71: mod_base = OTHER; note = 2'-O-methyl modified nucleotide
  modified_base 72: mod_base = OTHER; note = 2'-O-methyl modified nucleotide
  modified_base 73: mod_base = OTHER; note = 2'-O-methyl modified nucleotide
  modified_base 74: mod_base = OTHER; note = 2'-O-methyl modified nucleotide
  modified_base 75: mod_base = OTHER; note = 2'-O-methyl modified nucleotide
  modified_base 76: mod_base = OTHER; note = 2'-O-methyl modified nucleotide
  modified_base 77: mod_base = OTHER; note = 2'-O-methyl modified nucleotide
  modified_base 78: mod_base = OTHER; note = 2'-O-methyl modified nucleotide
  modified_base 79: mod_base = OTHER; note = 2'-O-methyl modified nucleotide
  modified_base 80: mod_base = OTHER; note = 2'-O-methyl modified nucleotide
  modified_base 81: mod_base = OTHER; note = 2'-O-methyl modified nucleotide
  modified_base 82: mod_base = OTHER; note = 2'-O-methyl modified nucleotide
  modified_base 83: mod_base = OTHER; note = 2'-O-methyl modified nucleotide
  modified_base 84: mod_base = OTHER; note = 2'-O-methyl modified nucleotide
  modified_base 85: mod_base = OTHER; note = 2'-O-methyl modified nucleotide
  modified_base 86: mod_base = OTHER; note = 2'-O-methyl modified nucleotide
  modified_base 87: mod_base = OTHER; note = 2'-O-methyl modified nucleotide
  modified_base 88: mod_base = OTHER; note = 2'-O-methyl modified nucleotide
  modified_base 89: mod_base = OTHER; note = 2'-O-methyl modified nucleotide
  modified_base 90: mod_base = OTHER; note = 2'-O-methyl modified nucleotide
  modified_base 91: mod_base = OTHER; note = 2'-O-methyl modified nucleotide
  modified_base 92: mod_base = OTHER; note = 2'-O-methyl modified nucleotide
  modified_base 93: mod_base = OTHER; note = 2'-O-methyl modified nucleotide
  modified_base 94: mod_base = OTHER; note = 2'-O-methyl modified nucleotide
  modified_base 95: mod_base = OTHER; note = 2'-O-methyl modified nucleotide
  modified_base 96: mod_base = OTHER; note = 2'-O-methyl modified nucleotide
  modified_base 126: mod_base = OTHER; note = Nucleotide with phosphorothioate linkage
  modified_base 127: mod_base = OTHER; note = 2'-O-methyl modified nucleotide with phosphorothioate linkage
  modified_base 128: mod_base = OTHER; note = 2'-O-methyl modified nucleotide with phosphorothioate linkage
  modified_base 129: mod_base = OTHER; note = 2'-O-methyl modified nucleotide
gagaatcaaaatcggtgaatgttttagagctagaaatagcaagttaaaataaggctagtccgttatcaacttgaaaaagtggcaccgagtcggtgccaagtctgtctgccttagtgattcaccgatttt

SEQ ID NO: 16203 - RNA, 128 nt, synthetic construct
  source 1..128: mol_type = other RNA
  modified_base 1: mod_base = OTHER; note = 2'-O-methyl modified nucleotide with phosphorothioate linkage
  modified_base 2: mod_base = OTHER; note = 2'-O-methyl modified nucleotide with phosphorothioate linkage
  modified_base 3: mod_base = OTHER; note = 2'-O-methyl modified nucleotide with phosphorothioate linkage
  modified_base 29: mod_base = OTHER; note = 2'-O-methyl modified nucleotide
  modified_base 30: mod_base = OTHER; note = 2'-O-methyl modified nucleotide
  modified_base 31: mod_base = OTHER; note = 2'-O-methyl modified nucleotide
  modified_base 32: mod_base = OTHER; note = 2'-O-methyl modified nucleotide
  modified_base 33: mod_base = OTHER; note = 2'-O-methyl modified nucleotide
  modified_base 34: mod_base = OTHER; note = 2'-O-methyl modified nucleotide
  modified_base 35: mod_base = OTHER; note = 2'-O-methyl modified nucleotide
  modified_base 36: mod_base = OTHER; note = 2'-O-methyl modified nucleotide
  modified_base 37: mod_base = OTHER; note = 2'-O-methyl modified nucleotide
  modified_base 38: mod_base = OTHER; note = 2'-O-methyl modified nucleotide
  modified_base 39: mod_base = OTHER; note = 2'-O-methyl modified nucleotide
  modified_base 40: mod_base = OTHER; note = 2'-O-methyl modified nucleotide
  modified_base 69: mod_base = OTHER; note = 2'-O-methyl modified nucleotide
  modified_base 70: mod_base = OTHER; note = 2'-O-methyl modified nucleotide
  modified_base 71: mod_base = OTHER; note = 2'-O-methyl modified nucleotide
  modified_base 72: mod_base = OTHER; note = 2'-O-methyl modified nucleotide
  modified_base 73: mod_base = OTHER; note = 2'-O-methyl modified nucleotide
  modified_base 74: mod_base = OTHER; note = 2'-O-methyl modified nucleotide
  modified_base 75: mod_base = OTHER; note = 2'-O-methyl modified nucleotide
  modified_base 76: mod_base = OTHER; note = 2'-O-methyl modified nucleotide
  modified_base 77: mod_base = OTHER; note = 2'-O-methyl modified nucleotide
  modified_base 78: mod_base = OTHER; note = 2'-O-methyl modified nucleotide
  modified_base 79: mod_base = OTHER; note = 2'-O-methyl modified nucleotide
  modified_base 80: mod_base = OTHER; note = 2'-O-methyl modified nucleotide
  modified_base 81: mod_base = OTHER; note = 2'-O-methyl modified nucleotide
  modified_base 82: mod_base = OTHER; note = 2'-O-methyl modified nucleotide
  modified_base 83: mod_base = OTHER; note = 2'-O-methyl modified nucleotide
  modified_base 84: mod_base = OTHER; note = 2'-O-methyl modified nucleotide
  modified_base 85: mod_base = OTHER; note = 2'-O-methyl modified nucleotide
  modified_base 86: mod_base = OTHER; note = 2'-O-methyl modified nucleotide
  modified_base 87: mod_base = OTHER; note = 2'-O-methyl modified nucleotide
  modified_base 88: mod_base = OTHER; note = 2'-O-methyl modified nucleotide
  modified_base 89: mod_base = OTHER; note = 2'-O-methyl modified nucleotide
  modified_base 90: mod_base = OTHER; note = 2'-O-methyl modified nucleotide
  modified_base 91: mod_base = OTHER; note = 2'-O-methyl modified nucleotide
  modified_base 92: mod_base = OTHER; note = 2'-O-methyl modified nucleotide
  modified_base 93: mod_base = OTHER; note = 2'-O-methyl modified nucleotide
  modified_base 94: mod_base = OTHER; note = 2'-O-methyl modified nucleotide
  modified_base 95: mod_base = OTHER; note = 2'-O-methyl modified nucleotide
  modified_base 96: mod_base = OTHER; note = 2'-O-methyl modified nucleotide
  modified_base 125: mod_base = OTHER; note = Nucleotide with phosphorothioate linkage
  modified_base 126: mod_base = OTHER; note = 2'-O-methyl modified nucleotide with phosphorothioate linkage
  modified_base 127: mod_base = OTHER; note = 2'-O-methyl modified nucleotide with phosphorothioate linkage
  modified_base 128: mod_base = OTHER; note = 2'-O-methyl modified nucleotide
gagaatcaaaatcggtgaatgttttagagctagaaatagcaagttaaaataaggctagtccgttatcaacttgaaaaagtggcaccgagtcggtgccaagtctgtctgccttagtgattcaccgattt

SEQ ID NO: 16204 - RNA, 127 nt, synthetic construct
  source 1..127: mol_type = other RNA
  modified_base 1: mod_base = OTHER; note = 2'-O-methyl modified nucleotide with phosphorothioate linkage
  modified_base 2: mod_base = OTHER; note = 2'-O-methyl modified nucleotide with phosphorothioate linkage
  modified_base 3: mod_base = OTHER; note = 2'-O-methyl modified nucleotide with phosphorothioate linkage
  modified_base 29: mod_base = OTHER; note = 2'-O-methyl modified nucleotide
  modified_base 30: mod_base = OTHER; note = 2'-O-methyl modified nucleotide
  modified_base 31: mod_base = OTHER; note = 2'-O-methyl modified nucleotide
  modified_base 32: mod_base = OTHER; note = 2'-O-methyl modified nucleotide
  modified_base 33: mod_base = OTHER; note = 2'-O-methyl modified nucleotide
  modified_base 34: mod_base = OTHER; note = 2'-O-methyl modified nucleotide
  modified_base 35: mod_base = OTHER; note = 2'-O-methyl modified nucleotide
  modified_base 36: mod_base = OTHER; note = 2'-O-methyl modified nucleotide
  modified_base 37: mod_base = OTHER; note = 2'-O-methyl modified nucleotide
  modified_base 38: mod_base = OTHER; note = 2'-O-methyl modified nucleotide
  modified_base 39: mod_base = OTHER; note = 2'-O-methyl modified nucleotide
  modified_base 40: mod_base = OTHER; note = 2'-O-methyl modified nucleotide
  modified_base 69: mod_base = OTHER; note = 2'-O-methyl modified nucleotide
  modified_base 70: mod_base = OTHER; note = 2'-O-methyl modified nucleotide
  modified_base 71: mod_base = OTHER; note = 2'-O-methyl modified nucleotide
  modified_base 72: mod_base = OTHER; note = 2'-O-methyl modified nucleotide
  modified_base 73: mod_base = OTHER; note = 2'-O-methyl modified nucleotide
  modified_base 74: mod_base = OTHER; note = 2'-O-methyl modified nucleotide
  modified_base 75: mod_base = OTHER; note = 2'-O-methyl modified nucleotide
  modified_base 76: mod_base = OTHER; note = 2'-O-methyl modified nucleotide
  modified_base 77: mod_base = OTHER; note = 2'-O-methyl modified nucleotide
  modified_base 78: mod_base = OTHER; note = 2'-O-methyl modified nucleotide
  modified_base 79: mod_base = OTHER; note = 2'-O-methyl modified nucleotide
  modified_base 80: mod_base = OTHER; note = 2'-O-methyl modified nucleotide
  modified_base 81: mod_base = OTHER; note = 2'-O-methyl modified nucleotide
  modified_base 82: mod_base = OTHER; note = 2'-O-methyl modified nucleotide
  modified_base 83: mod_base = OTHER; note = 2'-O-methyl modified nucleotide
  modified_base 84: mod_base = OTHER; note = 2'-O-methyl modified nucleotide
  modified_base 85: mod_base = OTHER; note = 2'-O-methyl modified nucleotide
  modified_base 86: mod_base = OTHER; note = 2'-O-methyl modified nucleotide
  modified_base 87: mod_base = OTHER; note = 2'-O-methyl modified nucleotide
  modified_base 88: mod_base = OTHER; note = 2'-O-methyl modified nucleotide
  modified_base 89: mod_base = OTHER; note = 2'-O-methyl modified nucleotide
  modified_base 90: mod_base = OTHER; note = 2'-O-methyl modified nucleotide
  modified_base 91: mod_base = OTHER; note = 2'-O-methyl modified nucleotide
  modified_base 92: mod_base = OTHER; note = 2'-O-methyl modified nucleotide
  modified_base 93: mod_base = OTHER; note = 2'-O-methyl modified nucleotide
  modified_base 94: mod_base = OTHER; note = 2'-O-methyl modified nucleotide
  modified_base 95: mod_base = OTHER; note = 2'-O-methyl modified nucleotide
  modified_base 96: mod_base = OTHER; note = 2'-O-methyl modified nucleotide
  modified_base 124: mod_base = OTHER; note = Nucleotide with phosphorothioate linkage
  modified_base 125: mod_base = OTHER; note = 2'-O-methyl modified nucleotide with phosphorothioate linkage
  modified_base 126: mod_base = OTHER; note = 2'-O-methyl modified nucleotide with phosphorothioate linkage
  modified_base 127: mod_base = OTHER; note = 2'-O-methyl modified nucleotide
gagaatcaaaatcggtgaatgttttagagctagaaatagcaagttaaaataaggctagtccgttatcaacttgaaaaagtggcaccgagtcggtgccaagtctgtctgccttagtgattcaccgatt

SEQ ID NO: 16205 - RNA, 134 nt, synthetic construct
  source 1..134: mol_type = other RNA
  modified_base 1: mod_base = OTHER; note = 2'-O-methyl modified nucleotide with phosphorothioate linkage
  modified_base 2: mod_base = OTHER; note = 2'-O-methyl modified nucleotide with phosphorothioate linkage
  modified_base 3: mod_base = OTHER; note = 2'-O-methyl modified nucleotide with phosphorothioate linkage
  modified_base 29: mod_base = OTHER; note = 2'-O-methyl modified nucleotide
  modified_base 30: mod_base = OTHER; note = 2'-O-methyl modified nucleotide
  modified_base 31: mod_base = OTHER; note = 2'-O-methyl modified nucleotide
  modified_base 32: mod_base = OTHER; note = 2'-O-methyl modified nucleotide
  modified_base 33: mod_base = OTHER; note = 2'-O-methyl modified nucleotide
  modified_base 34: mod_base = OTHER; note = 2'-O-methyl modified nucleotide
  modified_base 35: mod_base = OTHER; note = 2'-O-methyl modified nucleotide
  modified_base 36: mod_base = OTHER; note = 2'-O-methyl modified nucleotide
  modified_base 37: mod_base = OTHER; note = 2'-O-methyl modified nucleotide
  modified_base 38: mod_base = OTHER; note = 2'-O-methyl modified nucleotide
  modified_base 39: mod_base = OTHER; note = 2'-O-methyl modified nucleotide
  modified_base 40: mod_base = OTHER; note = 2'-O-methyl modified nucleotide
  modified_base 69: mod_base = OTHER; note = 2'-O-methyl modified nucleotide
  modified_base 70: mod_base = OTHER; note = 2'-O-methyl modified nucleotide
  modified_base 71: mod_base = OTHER; note = 2'-O-methyl modified nucleotide
  modified_base 72: mod_base = OTHER; note = 2'-O-methyl modified nucleotide
  modified_base 73: mod_base = OTHER; note = 2'-O-methyl modified nucleotide
  modified_base 74: mod_base = OTHER; note = 2'-O-methyl modified nucleotide
  modified_base 75: mod_base = OTHER; note = 2'-O-methyl modified nucleotide
  modified_base 76: mod_base = OTHER; note = 2'-O-methyl modified nucleotide
  modified_base 77: mod_base = OTHER; note = 2'-O-methyl modified nucleotide
  modified_base 78: mod_base = OTHER; note = 2'-O-methyl modified nucleotide
  modified_base 79: mod_base = OTHER; note = 2'-O-methyl modified nucleotide
  modified_base 80: mod_base = OTHER; note = 2'-O-methyl modified nucleotide
  modified_base 81: mod_base = OTHER; note = 2'-O-methyl modified nucleotide
  modified_base 82: mod_base = OTHER; note = 2'-O-methyl modified nucleotide
  modified_base 83: mod_base = OTHER; note = 2'-O-methyl modified nucleotide
  modified_base 84: mod_base = OTHER; note = 2'-O-methyl modified nucleotide
  modified_base 85: mod_base = OTHER; note = 2'-O-methyl modified nucleotide
  modified_base 86: mod_base = OTHER; note = 2'-O-methyl modified nucleotide
  modified_base 87: mod_base = OTHER; note = 2'-O-methyl modified nucleotide
  modified_base 88: mod_base = OTHER; note = 2'-O-methyl modified nucleotide
  modified_base 89: mod_base = OTHER; note = 2'-O-methyl modified nucleotide
  modified_base 90: mod_base = OTHER; note = 2'-O-methyl modified nucleotide
  modified_base 91: mod_base = OTHER; note = 2'-O-methyl modified nucleotide
  modified_base 92: mod_base = OTHER; note = 2'-O-methyl modified nucleotide
  modified_base 93: mod_base = OTHER; note = 2'-O-methyl modified nucleotide
  modified_base 94: mod_base = OTHER; note = 2'-O-methyl modified nucleotide
  modified_base 95: mod_base = OTHER; note = 2'-O-methyl modified nucleotide
  modified_base 96: mod_base = OTHER; note = 2'-O-methyl modified nucleotide
  modified_base 131: mod_base = OTHER; note = Nucleotide with phosphorothioate linkage
  modified_base 132: mod_base = OTHER; note = 2'-O-methyl modified nucleotide with phosphorothioate linkage
  modified_base 133: mod_base = OTHER; note = 2'-O-methyl modified nucleotide with phosphorothioate linkage
  modified_base 134: mod_base = OTHER; note = 2'-O-methyl modified nucleotide
gagaatcaaaatcggtgaatgttttagagctagaaatagcaagttaaaataaggctagtccgttatcaacttgaaaaagtggcaccgagtcggtgcgacaagtctgtctgccttagtgattcaccgattttgat

SEQ ID NO: 16206 - RNA, 133 nt, synthetic construct
  source 1..133: mol_type = other RNA
  modified_base 1: mod_base = OTHER; note = 2'-O-methyl modified nucleotide with phosphorothioate linkage
  modified_base 2: mod_base = OTHER; note = 2'-O-methyl modified nucleotide with phosphorothioate linkage
  modified_base 3: mod_base = OTHER; note = 2'-O-methyl modified nucleotide with phosphorothioate linkage
  modified_base 29: mod_base = OTHER; note = 2'-O-methyl modified nucleotide
  modified_base 30: mod_base = OTHER; note = 2'-O-methyl modified nucleotide
  modified_base 31: mod_base = OTHER; note = 2'-O-methyl modified nucleotide
  modified_base 32: mod_base = OTHER; note = 2'-O-methyl modified nucleotide
  modified_base 33: mod_base = OTHER; note = 2'-O-methyl modified nucleotide
  modified_base 34: mod_base = OTHER; note = 2'-O-methyl modified nucleotide
  modified_base 35: mod_base = OTHER; note = 2'-O-methyl modified nucleotide
  modified_base 36: mod_base = OTHER; note = 2'-O-methyl modified nucleotide
  modified_base 37: mod_base = OTHER; note = 2'-O-methyl modified nucleotide
  modified_base 38: mod_base = OTHER; note = 2'-O-methyl modified nucleotide
  modified_base 39: mod_base = OTHER; note = 2'-O-methyl modified nucleotide
  modified_base 40: mod_base = OTHER; note = 2'-O-methyl modified nucleotide
  modified_base 69: mod_base = OTHER; note = 2'-O-methyl modified nucleotide
  modified_base 70: mod_base = OTHER; note = 2'-O-methyl modified nucleotide
  modified_base 71: mod_base = OTHER; note = 2'-O-methyl modified nucleotide
  modified_base 72: mod_base = OTHER; note = 2'-O-methyl modified nucleotide
  modified_base 73: mod_base = OTHER; note = 2'-O-methyl modified nucleotide
  modified_base 74: mod_base = OTHER; note = 2'-O-methyl modified nucleotide
  modified_base 75: mod_base = OTHER; note = 2'-O-methyl modified nucleotide
  modified_base 76: mod_base = OTHER; note = 2'-O-methyl modified nucleotide
  modified_base 77: mod_base = OTHER; note = 2'-O-methyl modified nucleotide
  modified_base 78: mod_base = OTHER; note = 2'-O-methyl modified nucleotide
  modified_base 79: mod_base = OTHER; note = 2'-O-methyl modified nucleotide
  modified_base 80: mod_base = OTHER; note = 2'-O-methyl modified nucleotide
  modified_base 81: mod_base = OTHER; note = 2'-O-methyl modified nucleotide
  modified_base 82: mod_base = OTHER; note = 2'-O-methyl modified nucleotide
  modified_base 83: mod_base = OTHER; note = 2'-O-methyl modified nucleotide
  modified_base 84: mod_base = OTHER; note = 2'-O-methyl modified nucleotide
  modified_base 85: mod_base = OTHER; note = 2'-O-methyl modified nucleotide
  modified_base 86: mod_base = OTHER; note = 2'-O-methyl modified nucleotide
  modified_base 87: mod_base = OTHER; note = 2'-O-methyl modified nucleotide
  modified_base 88: mod_base = OTHER; note = 2'-O-methyl modified nucleotide
  modified_base 89: mod_base = OTHER; note = 2'-O-methyl modified nucleotide
  modified_base 90: mod_base = OTHER; note = 2'-O-methyl modified nucleotide
  modified_base 91: mod_base = OTHER; note = 2'-O-methyl modified nucleotide
  modified_base 92: mod_base = OTHER; note = 2'-O-methyl modified nucleotide
  modified_base 93: mod_base = OTHER; note = 2'-O-methyl modified nucleotide
  modified_base 94: mod_base = OTHER; note = 2'-O-methyl modified nucleotide
  modified_base 95: mod_base = OTHER; note = 2'-O-methyl modified nucleotide
  modified_base 96: mod_base = OTHER; note = 2'-O-methyl modified nucleotide
  modified_base 130: mod_base = OTHER; note = Nucleotide with phosphorothioate linkage
  modified_base 131: mod_base = OTHER; note = 2'-O-methyl modified nucleotide with phosphorothioate linkage
  modified_base 132: mod_base = OTHER; note = 2'-O-methyl modified nucleotide with phosphorothioate linkage
  modified_base 133: mod_base = OTHER; note = 2'-O-methyl modified nucleotide
gagaatcaaaatcggtgaatgttttagagctagaaatagcaagttaaaataaggctagtccgttatcaacttgaaaaagtggcaccgagtcggtgcgacaagtctgtctgccttagtgattcaccgattttga

SEQ ID NO: 16207 - RNA, 132 nt, synthetic construct
  source 1..132: mol_type = other RNA
  modified_base 1: mod_base = OTHER; note = 2'-O-methyl modified nucleotide with phosphorothioate linkage
  modified_base 2: mod_base = OTHER; note = 2'-O-methyl modified nucleotide with phosphorothioate linkage
  modified_base 3: mod_base = OTHER; note = 2'-O-methyl modified nucleotide with phosphorothioate linkage
  modified_base 29: mod_base = OTHER; note = 2'-O-methyl modified nucleotide
  modified_base 30: mod_base = OTHER; note = 2'-O-methyl modified nucleotide
  modified_base 31: mod_base = OTHER; note = 2'-O-methyl modified nucleotide
  modified_base 32: mod_base = OTHER; note = 2'-O-methyl modified nucleotide
  modified_base 33: mod_base = OTHER; note = 2'-O-methyl modified nucleotide
  modified_base 34: mod_base = OTHER; note = 2'-O-methyl modified nucleotide
  modified_base 35: mod_base = OTHER; note = 2'-O-methyl modified nucleotide
  modified_base 36: mod_base = OTHER; note = 2'-O-methyl modified nucleotide
  modified_base 37: mod_base = OTHER; note = 2'-O-methyl modified nucleotide
  modified_base 38: mod_base = OTHER; note = 2'-O-methyl modified nucleotide
  modified_base 39: mod_base = OTHER; note = 2'-O-methyl modified nucleotide
  modified_base 40: mod_base = OTHER; note = 2'-O-methyl modified nucleotide
  modified_base 69: mod_base = OTHER; note = 2'-O-methyl modified nucleotide
  modified_base 70: mod_base = OTHER; note = 2'-O-methyl modified nucleotide
  modified_base 71: mod_base = OTHER; note = 2'-O-methyl modified nucleotide
  modified_base 72: mod_base = OTHER; note = 2'-O-methyl modified nucleotide
  modified_base 73: mod_base = OTHER; note = 2'-O-methyl modified nucleotide
  modified_base 74: mod_base = OTHER; note = 2'-O-methyl modified nucleotide
  modified_base 75: mod_base = OTHER; note = 2'-O-methyl modified nucleotide
  modified_base 76: mod_base = OTHER; note = 2'-O-methyl modified nucleotide
  modified_base 77: mod_base = OTHER; note = 2'-O-methyl modified nucleotide
  modified_base 78: mod_base = OTHER; note = 2'-O-methyl modified nucleotide
  modified_base 79: mod_base = OTHER; note = 2'-O-methyl modified nucleotide
  modified_base 80: mod_base = OTHER; note = 2'-O-methyl modified nucleotide
  modified_base 81: mod_base = OTHER; note = 2'-O-methyl modified nucleotide
  modified_base 82: mod_base = OTHER; note = 2'-O-methyl modified nucleotide
  modified_base 83: mod_base = OTHER; note = 2'-O-methyl modified nucleotide
  modified_base 84: mod_base = OTHER; note = 2'-O-methyl modified nucleotide
  modified_base 85: mod_base = OTHER; note = 2'-O-methyl modified nucleotide
  modified_base 86: mod_base = OTHER; note = 2'-O-methyl modified nucleotide
  modified_base 87: mod_base = OTHER; note = 2'-O-methyl modified nucleotide
  modified_base 88: mod_base = OTHER; note = 2'-O-methyl modified nucleotide
  modified_base 89: mod_base = OTHER; note = 2'-O-methyl modified nucleotide
  modified_base 90: mod_base = OTHER; note = 2'-O-methyl modified nucleotide
  modified_base 91: mod_base = OTHER; note = 2'-O-methyl modified nucleotide
  modified_base 92: mod_base = OTHER; note = 2'-O-methyl modified nucleotide
  modified_base 93: mod_base = OTHER; note = 2'-O-methyl modified nucleotide
  modified_base 94: mod_base = OTHER; note = 2'-O-methyl modified nucleotide
  modified_base 95: mod_base = OTHER; note = 2'-O-methyl modified nucleotide
  modified_base 96: mod_base = OTHER; note = 2'-O-methyl modified nucleotide
  modified_base 129: mod_base = OTHER; note = Nucleotide with phosphorothioate linkage
  modified_base 130: mod_base = OTHER; note = 2'-O-methyl modified nucleotide with phosphorothioate linkage
  modified_base 131: mod_base = OTHER; note = 2'-O-methyl modified nucleotide with phosphorothioate linkage
  modified_base 132: mod_base = OTHER; note = 2'-O-methyl modified nucleotide
gagaatcaaaatcggtgaatgttttagagctagaaatagcaagttaaaataaggctagtccgttatcaacttgaaaaagtggcaccgagtcggtgcgacaagtctgtctgccttagtgattcaccgattttg

SEQ ID NO: 16208 - RNA, 131 nt, synthetic construct
  source 1..131: mol_type = other RNA
  modified_base 1: mod_base = OTHER; note = 2'-O-methyl modified nucleotide with phosphorothioate linkage
  modified_base 2: mod_base = OTHER; note = 2'-O-methyl modified nucleotide with phosphorothioate linkage
  modified_base 3: mod_base = OTHER; note = 2'-O-methyl modified nucleotide with phosphorothioate linkage
  modified_base 29: mod_base = OTHER; note = 2'-O-methyl modified nucleotide
  modified_base 30: mod_base = OTHER; note = 2'-O-methyl modified nucleotide
  modified_base 31: mod_base = OTHER; note = 2'-O-methyl modified nucleotide
  modified_base 32: mod_base = OTHER; note = 2'-O-methyl modified nucleotide
  modified_base 33: mod_base = OTHER; note = 2'-O-methyl modified nucleotide
  modified_base 34: mod_base = OTHER; note = 2'-O-methyl modified nucleotide
  modified_base 35: mod_base = OTHER; note = 2'-O-methyl modified nucleotide
  modified_base 36: mod_base = OTHER; note = 2'-O-methyl modified nucleotide
  modified_base 37: mod_base = OTHER; note = 2'-O-methyl modified nucleotide
  modified_base 38: mod_base = OTHER; note = 2'-O-methyl modified nucleotide
  modified_base 39: mod_base = OTHER; note = 2'-O-methyl modified nucleotide
  modified_base 40: mod_base = OTHER; note = 2'-O-methyl modified nucleotide
  modified_base 69: mod_base = OTHER; note = 2'-O-methyl modified nucleotide
  modified_base 70: mod_base = OTHER; note = 2'-O-methyl modified nucleotide
  modified_base 71: mod_base = OTHER; note = 2'-O-methyl modified nucleotide
  modified_base 72: mod_base = OTHER; note = 2'-O-methyl modified nucleotide
  modified_base 73: mod_base = OTHER; note = 2'-O-methyl modified nucleotide
  modified_base 74: mod_base = OTHER; note = 2'-O-methyl modified nucleotide
  modified_base 75: mod_base = OTHER; note = 2'-O-methyl modified nucleotide
  modified_base 76: mod_base = OTHER; note = 2'-O-methyl modified nucleotide
  modified_base 77: mod_base = OTHER; note = 2'-O-methyl modified nucleotide
  modified_base 78: mod_base = OTHER; note = 2'-O-methyl modified nucleotide
  modified_base 79: mod_base = OTHER; note = 2'-O-methyl modified nucleotide
  modified_base 80: mod_base = OTHER; note = 2'-O-methyl modified nucleotide
  modified_base 81: mod_base = OTHER; note = 2'-O-methyl modified nucleotide
  modified_base 82: mod_base = OTHER; note = 2'-O-methyl modified nucleotide
  modified_base 83: mod_base = OTHER; note = 2'-O-methyl modified nucleotide
  modified_base 84: mod_base = OTHER; note = 2'-O-methyl modified nucleotide
  modified_base 85: mod_base = OTHER; note = 2'-O-methyl modified nucleotide
  modified_base 86: mod_base = OTHER; note = 2'-O-methyl modified nucleotide
  modified_base 87: mod_base = OTHER; note = 2'-O-methyl modified nucleotide
  modified_base 88: mod_base = OTHER; note = 2'-O-methyl modified nucleotide
  modified_base 89: mod_base = OTHER; note = 2'-O-methyl modified nucleotide
  modified_base 90: mod_base = OTHER; note = 2'-O-methyl modified nucleotide
  modified_base 91: mod_base = OTHER; note = 2'-O-methyl modified nucleotide
  modified_base 92: mod_base = OTHER; note = 2'-O-methyl modified nucleotide
  modified_base 93: mod_base = OTHER; note = 2'-O-methyl modified nucleotide
  modified_base 94: mod_base = OTHER; note = 2'-O-methyl modified nucleotide
  modified_base 95: mod_base = OTHER; note = 2'-O-methyl modified nucleotide
  modified_base 96: mod_base = OTHER; note = 2'-O-methyl modified nucleotide
  modified_base 128: mod_base = OTHER; note = Nucleotide with phosphorothioate linkage
  modified_base 129: mod_base = OTHER; note = 2'-O-methyl modified nucleotide with phosphorothioate linkage
  modified_base 130: mod_base = OTHER; note = 2'-O-methyl modified nucleotide with phosphorothioate linkage
  modified_base 131: mod_base = OTHER; note = 2'-O-methyl modified nucleotide
gagaatcaaaatcggtgaatgttttagagctagaaatagcaagttaaaataaggctagtccgttatcaacttgaaaaagtggcaccgagtcggtgcgacaagtctgtctgccttagtgattcaccgatttt

SEQ ID NO: 16209 - RNA, 130 nt, synthetic construct
  source 1..130: mol_type = other RNA
  modified_base 1: mod_base = OTHER; note = 2'-O-methyl modified nucleotide with phosphorothioate linkage
  modified_base 2: mod_base = OTHER; note = 2'-O-methyl modified nucleotide with phosphorothioate linkage
  modified_base 3: mod_base = OTHER; note = 2'-O-methyl modified nucleotide with phosphorothioate linkage
  modified_base 29: mod_base = OTHER; note = 2'-O-methyl modified nucleotide
  modified_base 30: mod_base = OTHER; note = 2'-O-methyl modified nucleotide
  modified_base 31: mod_base = OTHER; note = 2'-O-methyl modified nucleotide
  modified_base 32: mod_base = OTHER; note = 2'-O-methyl modified nucleotide
  modified_base 33: mod_base = OTHER; note = 2'-O-methyl modified nucleotide
  modified_base 34: mod_base = OTHER; note = 2'-O-methyl modified nucleotide
  modified_base 35: mod_base = OTHER; note = 2'-O-methyl modified nucleotide
  modified_base 36: mod_base = OTHER; note = 2'-O-methyl modified nucleotide
  modified_base 37: mod_base = OTHER; note = 2'-O-methyl modified nucleotide
  modified_base 38: mod_base = OTHER; note = 2'-O-methyl modified nucleotide
  modified_base 39: mod_base = OTHER; note = 2'-O-methyl modified nucleotide
  modified_base 40: mod_base = OTHER; note = 2'-O-methyl modified nucleotide
  modified_base 69: mod_base = OTHER; note = 2'-O-methyl modified nucleotide
  modified_base 70: mod_base = OTHER; note = 2'-O-methyl modified nucleotide
  modified_base 71: mod_base = OTHER; note = 2'-O-methyl modified nucleotide
  modified_base 72: mod_base = OTHER; note = 2'-O-methyl modified nucleotide
  modified_base 73: mod_base = OTHER; note = 2'-O-methyl modified nucleotide
  modified_base 74: mod_base = OTHER; note = 2'-O-methyl modified nucleotide
  modified_base 75: mod_base = OTHER; note = 2'-O-methyl modified nucleotide
  modified_base 76: mod_base = OTHER; note = 2'-O-methyl modified nucleotide
  modified_base 77: mod_base = OTHER; note = 2'-O-methyl modified nucleotide
  modified_base 78: mod_base = OTHER; note = 2'-O-methyl modified nucleotide
  modified_base 79: mod_base = OTHER; note = 2'-O-methyl modified nucleotide
  modified_base 80: mod_base = OTHER; note = 2'-O-methyl modified nucleotide
  modified_base 81: mod_base = OTHER; note = 2'-O-methyl modified nucleotide
  modified_base 82: mod_base = OTHER; note = 2'-O-methyl modified nucleotide
  modified_base 83: mod_base = OTHER; note = 2'-O-methyl modified nucleotide
  modified_base 84: mod_base = OTHER; note = 2'-O-methyl modified nucleotide
  modified_base 85: mod_base = OTHER; note = 2'-O-methyl modified nucleotide
  modified_base 86: mod_base = OTHER; note = 2'-O-methyl modified nucleotide
  modified_base 87: mod_base = OTHER; note = 2'-O-methyl modified nucleotide
  modified_base 88: mod_base = OTHER; note = 2'-O-methyl modified nucleotide
  modified_base 89: mod_base = OTHER; note = 2'-O-methyl modified nucleotide
  modified_base 90: mod_base = OTHER; note = 2'-O-methyl modified nucleotide
  modified_base 91: mod_base = OTHER; note = 2'-O-methyl modified nucleotide
  modified_base 92: mod_base = OTHER; note = 2'-O-methyl modified nucleotide
  modified_base 93: mod_base = OTHER; note = 2'-O-methyl modified nucleotide
  modified_base 94: mod_base = OTHER; note = 2'-O-methyl modified nucleotide
  modified_base 95: mod_base = OTHER; note = 2'-O-methyl modified nucleotide
  modified_base 96: mod_base = OTHER; note = 2'-O-methyl modified nucleotide
  modified_base 127: mod_base = OTHER; note = Nucleotide with phosphorothioate linkage
  modified_base 128: mod_base = OTHER; note = 2'-O-methyl modified nucleotide with phosphorothioate linkage
  modified_base 129: mod_base = OTHER; note = 2'-O-methyl modified nucleotide with phosphorothioate linkage
  modified_base 130: mod_base = OTHER; note = 2'-O-methyl modified nucleotide
gagaatcaaaatcggtgaatgttttagagctagaaatagcaagttaaaataaggctagtccgttatcaacttgaaaaagtggcaccgagtcggtgcgacaagtctgtctgccttagtgattcaccgattt

SEQ ID NO: 16210 - RNA, 129 nt, synthetic construct
  source 1..129: mol_type = other RNA
  modified_base 1: mod_base = OTHER; note = 2'-O-methyl modified nucleotide with phosphorothioate linkage
  modified_base 2: mod_base = OTHER; note = 2'-O-methyl modified nucleotide with phosphorothioate linkage
  modified_base 3: mod_base = OTHER; note = 2'-O-methyl modified nucleotide with phosphorothioate linkage
  modified_base 29: mod_base = OTHER; note = 2'-O-methyl modified nucleotide
  modified_base 30: mod_base = OTHER; note = 2'-O-methyl modified nucleotide
  modified_base 31: mod_base = OTHER; note = 2'-O-methyl modified nucleotide
  modified_base 32: mod_base = OTHER; note = 2'-O-methyl modified nucleotide
  modified_base 33: mod_base = OTHER; note = 2'-O-methyl modified nucleotide
  modified_base 34: mod_base = OTHER; note = 2'-O-methyl modified nucleotide
  modified_base 35: mod_base = OTHER; note = 2'-O-methyl modified nucleotide
  modified_base 36: mod_base = OTHER; note = 2'-O-methyl modified nucleotide
  modified_base 37: mod_base = OTHER; note = 2'-O-methyl modified nucleotide
  modified_base 38: mod_base = OTHER; note = 2'-O-methyl modified nucleotide
  modified_base 39: mod_base = OTHER; note = 2'-O-methyl modified nucleotide
  modified_base 40: mod_base = OTHER; note = 2'-O-methyl modified nucleotide
  modified_base 69: mod_base = OTHER; note = 2'-O-methyl modified nucleotide
  modified_base 70: mod_base = OTHER; note = 2'-O-methyl modified nucleotide
  modified_base 71: mod_base = OTHER; note = 2'-O-methyl modified nucleotide
  modified_base 72: mod_base = OTHER; note = 2'-O-methyl modified nucleotide
  modified_base 73: mod_base = OTHER; note = 2'-O-methyl modified nucleotide
  modified_base 74: mod_base = OTHER; note = 2'-O-methyl modified nucleotide
  modified_base 75: mod_base = OTHER; note = 2'-O-methyl modified nucleotide
  modified_base 76: mod_base = OTHER; note = 2'-O-methyl modified nucleotide
  modified_base 77: mod_base = OTHER; note = 2'-O-methyl modified nucleotide
  modified_base 78: mod_base = OTHER; note = 2'-O-methyl modified nucleotide
  modified_base 79: mod_base = OTHER; note = 2'-O-methyl modified nucleotide
  modified_base 80: mod_base = OTHER; note = 2'-O-methyl modified nucleotide
  modified_base 81: mod_base = OTHER; note = 2'-O-methyl modified nucleotide
  modified_base 82: mod_base = OTHER; note = 2'-O-methyl modified nucleotide
  modified_base 83: mod_base = OTHER; note = 2'-O-methyl modified nucleotide
  modified_base 84: mod_base = OTHER; note = 2'-O-methyl modified nucleotide
  modified_base 85: mod_base = OTHER; note = 2'-O-methyl modified nucleotide
  modified_base 86: mod_base = OTHER; note = 2'-O-methyl modified nucleotide
  modified_base 87: mod_base = OTHER; note = 2'-O-methyl modified nucleotide
  modified_base 88: mod_base = OTHER; note = 2'-O-methyl modified nucleotide
  modified_base 89: mod_base = OTHER; note = 2'-O-methyl modified nucleotide
  modified_base 90: mod_base = OTHER; note = 2'-O-methyl modified nucleotide
  modified_base 91: mod_base = OTHER; note = 2'-O-methyl modified nucleotide
  modified_base 92: mod_base = OTHER; note = 2'-O-methyl modified nucleotide
  modified_base 93: mod_base = OTHER; note = 2'-O-methyl modified nucleotide
  modified_base 94: mod_base = OTHER; note = 2'-O-methyl modified nucleotide
  modified_base 95: mod_base = OTHER; note = 2'-O-methyl modified nucleotide
  modified_base 96: mod_base = OTHER; note = 2'-O-methyl modified nucleotide
  modified_base 126: mod_base = OTHER; note = Nucleotide with phosphorothioate linkage
  modified_base 127: mod_base = OTHER; note = 2'-O-methyl modified nucleotide with phosphorothioate linkage
  modified_base 128: mod_base = OTHER; note = 2'-O-methyl modified nucleotide with phosphorothioate linkage
  modified_base 129: mod_base = OTHER; note = 2'-O-methyl modified nucleotide
gagaatcaaaatcggtgaatgttttagagctagaaatagcaagttaaaataaggctagtccgttatcaacttgaaaaagtggcaccgagtcggtgcgacaagtctgtctgccttagtgattcaccgatt

SEQ ID NO: 16211 - RNA, 124 nt, synthetic construct
  source 1..124: mol_type = other RNA
  modified_base 1: mod_base = OTHER; note = 2'-O-methyl modified nucleotide with phosphorothioate linkage
  modified_base 2: mod_base = OTHER; note = 2'-O-methyl modified nucleotide with phosphorothioate linkage
  modified_base 3: mod_base = OTHER; note = 2'-O-methyl modified nucleotide with phosphorothioate linkage
  modified_base 29: mod_base = OTHER; note = 2'-O-methyl modified nucleotide
  modified_base 30: mod_base = OTHER; note = 2'-O-methyl modified nucleotide
  modified_base 31: mod_base = OTHER; note = 2'-O-methyl modified nucleotide
  modified_base 32: mod_base = OTHER; note = 2'-O-methyl modified nucleotide
  modified_base 33: mod_base = OTHER; note = 2'-O-methyl modified nucleotide
  modified_base 34: mod_base = OTHER; note = 2'-O-methyl modified nucleotide
  modified_base 35: mod_base = OTHER; note = 2'-O-methyl modified nucleotide
  modified_base 36: mod_base = OTHER; note = 2'-O-methyl modified nucleotide
  modified_base 37: mod_base = OTHER; note = 2'-O-methyl modified nucleotide
  modified_base 38: mod_base = OTHER; note = 2'-O-methyl modified nucleotide
  modified_base 39: mod_base = OTHER; note = 2'-O-methyl modified nucleotide
  modified_base 40: mod_base = OTHER; note = 2'-O-methyl modified nucleotide
  modified_base 69: mod_base = OTHER; note = 2'-O-methyl modified nucleotide
  modified_base 70: mod_base = OTHER; note = 2'-O-methyl modified nucleotide
  modified_base 71: mod_base = OTHER; note = 2'-O-methyl modified nucleotide
  modified_base 72: mod_base = OTHER; note = 2'-O-methyl modified nucleotide
  modified_base 73: mod_base = OTHER; note = 2'-O-methyl modified nucleotide
  modified_base 74: mod_base = OTHER; note = 2'-O-methyl modified nucleotide
  modified_base 75: mod_base = OTHER; note = 2'-O-methyl modified nucleotide
  modified_base 76: mod_base = OTHER; note = 2'-O-methyl modified nucleotide
  modified_base 77: mod_base = OTHER; note = 2'-O-methyl modified nucleotide
  modified_base 78: mod_base = OTHER; note = 2'-O-methyl modified nucleotide
  modified_base 79: mod_base = OTHER; note = 2'-O-methyl modified nucleotide
  modified_base 80: mod_base = OTHER; note = 2'-O-methyl modified nucleotide
  modified_base 81: mod_base = OTHER; note = 2'-O-methyl modified nucleotide
  modified_base 82: mod_base = OTHER; note = 2'-O-methyl modified nucleotide
  modified_base 83: mod_base = OTHER; note = 2'-O-methyl modified nucleotide
  modified_base 84: mod_base = OTHER; note = 2'-O-methyl modified nucleotide
  modified_base 85: mod_base = OTHER; note = 2'-O-methyl modified nucleotide
  modified_base 86: mod_base = OTHER; note = 2'-O-methyl modified nucleotide
  modified_base 87: mod_base = OTHER; note = 2'-O-methyl modified nucleotide
  modified_base 88: mod_base = OTHER; note = 2'-O-methyl modified nucleotide
  modified_base 89: mod_base = OTHER; note = 2'-O-methyl modified nucleotide
  modified_base 90: mod_base = OTHER; note = 2'-O-methyl modified nucleotide
  modified_base 91: mod_base = OTHER; note = 2'-O-methyl modified nucleotide
  modified_base 92: mod_base = OTHER; note = 2'-O-methyl modified nucleotide
  modified_base 93: mod_base = OTHER; note = 2'-O-methyl modified nucleotide
  modified_base 94: mod_base = OTHER; note = 2'-O-methyl modified nucleotide
  modified_base 95: mod_base = OTHER; note = 2'-O-methyl modified nucleotide
  modified_base 96: mod_base = OTHER; note = 2'-O-methyl modified nucleotide
  modified_base 121: mod_base = OTHER; note = Nucleotide with phosphorothioate linkage
  modified_base 122: mod_base = OTHER; note = 2'-O-methyl modified nucleotide with phosphorothioate linkage
  modified_base 123: mod_base = OTHER; note = 2'-O-methyl modified nucleotide with phosphorothioate linkage
  modified_base 124: mod_base = OTHER; note = 2'-O-methyl modified nucleotide
gagaatcaaaatcggtgaatgttttagagctagaaatagcaagttaaaataaggctagtccgttatcaacttgaaaaagtggcaccgagtcggtgctgccttagttgaattcaccgattttgat

SEQ ID NO: 16212 - RNA, 123 nt, synthetic construct
  source 1..123: mol_type = other RNA
  modified_base 1: mod_base = OTHER; note = 2'-O-methyl modified nucleotide with phosphorothioate linkage
  modified_base 2: mod_base = OTHER; note = 2'-O-methyl modified nucleotide with phosphorothioate linkage
  modified_base 3: mod_base = OTHER; note = 2'-O-methyl modified nucleotide with phosphorothioate linkage
  modified_base 29: mod_base = OTHER; note = 2'-O-methyl modified nucleotide
  modified_base 30: mod_base = OTHER; note = 2'-O-methyl modified nucleotide
  modified_base 31: mod_base = OTHER; note = 2'-O-methyl modified nucleotide
  modified_base 32: mod_base = OTHER; note = 2'-O-methyl modified nucleotide
  modified_base 33: mod_base = OTHER; note = 2'-O-methyl modified nucleotide
  modified_base 34: mod_base = OTHER; note = 2'-O-methyl modified nucleotide
  modified_base 35: mod_base = OTHER; note = 2'-O-methyl modified nucleotide
  modified_base 36: mod_base = OTHER; note = 2'-O-methyl modified nucleotide
  modified_base 37: mod_base = OTHER; note = 2'-O-methyl modified nucleotide
  modified_base 38: mod_base = OTHER; note = 2'-O-methyl modified nucleotide
  modified_base 39: mod_base = OTHER; note = 2'-O-methyl modified nucleotide
  modified_base 40: mod_base = OTHER; note = 2'-O-methyl modified nucleotide
  modified_base 69: mod_base = OTHER; note = 2'-O-methyl modified nucleotide
  modified_base 70: mod_base = OTHER; note = 2'-O-methyl modified nucleotide
  modified_base 71: mod_base = OTHER; note = 2'-O-methyl modified nucleotide
  modified_base 72: mod_base = OTHER; note = 2'-O-methyl modified nucleotide
  modified_base 73: mod_base = OTHER; note = 2'-O-methyl modified nucleotide
  modified_base 74: mod_base = OTHER; note = 2'-O-methyl modified nucleotide
  modified_base 75: mod_base = OTHER; note = 2'-O-methyl modified nucleotide
  modified_base 76: mod_base = OTHER; note = 2'-O-methyl modified nucleotide
  modified_base 77: mod_base = OTHER; note = 2'-O-methyl modified nucleotide
  modified_base 78: mod_base = OTHER; note = 2'-O-methyl modified nucleotide
  modified_base 79: mod_base = OTHER; note = 2'-O-methyl modified nucleotide
  modified_base 80: mod_base = OTHER; note = 2'-O-methyl modified nucleotide
  modified_base 81: mod_base = OTHER; note = 2'-O-methyl modified nucleotide
  modified_base 82: mod_base = OTHER; note = 2'-O-methyl modified nucleotide
  modified_base 83: mod_base = OTHER; note = 2'-O-methyl modified nucleotide
  modified_base 84: mod_base = OTHER; note = 2'-O-methyl modified nucleotide
  modified_base 85: mod_base = OTHER; note = 2'-O-methyl modified nucleotide
  modified_base 86: mod_base = OTHER; note = 2'-O-methyl modified nucleotide
  modified_base 87: mod_base = OTHER; note = 2'-O-methyl modified nucleotide
  modified_base 88: mod_base = OTHER; note = 2'-O-methyl modified nucleotide
  modified_base 89: mod_base = OTHER; note = 2'-O-methyl modified nucleotide
  modified_base 90: mod_base = OTHER; note = 2'-O-methyl modified nucleotide
  modified_base 91: mod_base = OTHER; note = 2'-O-methyl modified nucleotide
  modified_base 92: mod_base = OTHER; note = 2'-O-methyl modified nucleotide
  modified_base 93: mod_base = OTHER; note = 2'-O-methyl modified nucleotide
  modified_base 94: mod_base = OTHER; note = 2'-O-methyl modified nucleotide
  modified_base 95: mod_base = OTHER; note = 2'-O-methyl modified nucleotide
  modified_base 96: mod_base = OTHER; note = 2'-O-methyl modified nucleotide
  modified_base 120: mod_base = OTHER; note = Nucleotide with phosphorothioate linkage
  modified_base 121: mod_base = OTHER; note = 2'-O-methyl modified nucleotide with phosphorothioate linkage
  modified_base 122: mod_base = OTHER; note = 2'-O-methyl modified nucleotide with phosphorothioate linkage
  modified_base 123: mod_base = OTHER; note = 2'-O-methyl modified nucleotide
gagaatcaaaatcggtgaatgttttagagctagaaatagcaagttaaaataaggctagtccgttatcaacttgaaaaagtggcaccgagtcggtgctgccttagttgaattcaccgattttga

SEQ ID NO: 16213 - RNA, 122 nt, synthetic construct
  source 1..122: mol_type = other RNA
  modified_base 1: mod_base = OTHER; note = 2'-O-methyl modified nucleotide with phosphorothioate linkage
  modified_base 2: mod_base = OTHER; note = 2'-O-methyl modified nucleotide with phosphorothioate linkage
  modified_base 3: mod_base = OTHER; note = 2'-O-methyl modified nucleotide with phosphorothioate linkage
  modified_base 29: mod_base = OTHER; note = 2'-O-methyl modified nucleotide
  modified_base 30: mod_base = OTHER; note = 2'-O-methyl modified nucleotide
  modified_base 31: mod_base = OTHER; note = 2'-O-methyl modified nucleotide
  modified_base 32: mod_base = OTHER; note = 2'-O-methyl modified nucleotide
  modified_base 33: mod_base = OTHER; note = 2'-O-methyl modified nucleotide
  modified_base 34: mod_base = OTHER; note = 2'-O-methyl modified nucleotide
  modified_base 35: mod_base = OTHER; note = 2'-O-methyl modified nucleotide
  modified_base 36: mod_base = OTHER; note = 2'-O-methyl modified nucleotide
  modified_base 37: mod_base = OTHER; note = 2'-O-methyl modified nucleotide
  modified_base 38: mod_base = OTHER; note = 2'-O-methyl modified nucleotide
  modified_base 39: mod_base = OTHER; note = 2'-O-methyl modified nucleotide
  modified_base 40: mod_base = OTHER; note = 2'-O-methyl modified nucleotide
  modified_base 69: mod_base = OTHER; note = 2'-O-methyl modified nucleotide
  modified_base 70: mod_base = OTHER; note = 2'-O-methyl modified nucleotide
  modified_base 71: mod_base = OTHER; note = 2'-O-methyl modified nucleotide
  modified_base 72: mod_base = OTHER; note = 2'-O-methyl modified nucleotide
  modified_base 73: mod_base = OTHER; note = 2'-O-methyl modified nucleotide
  modified_base 74: mod_base = OTHER; note = 2'-O-methyl modified nucleotide
  modified_base 75: mod_base = OTHER; note = 2'-O-methyl modified nucleotide
  modified_base 76: mod_base = OTHER; note = 2'-O-methyl modified nucleotide
  modified_base 77: mod_base = OTHER; note = 2'-O-methyl modified nucleotide
  modified_base 78: mod_base = OTHER; note = 2'-O-methyl modified nucleotide
  modified_base 79: mod_base = OTHER; note = 2'-O-methyl modified nucleotide
  modified_base 80: mod_base = OTHER; note = 2'-O-methyl modified nucleotide
  modified_base 81: mod_base = OTHER; note = 2'-O-methyl modified nucleotide
  modified_base 82: mod_base = OTHER; note = 2'-O-methyl modified nucleotide
  modified_base 83: mod_base = OTHER; note = 2'-O-methyl modified nucleotide
  modified_base 84: mod_base = OTHER; note = 2'-O-methyl modified nucleotide
  modified_base 85: mod_base = OTHER; note = 2'-O-methyl modified nucleotide
  modified_base 86: mod_base = OTHER; note = 2'-O-methyl modified nucleotide
  modified_base 87: mod_base = OTHER; note = 2'-O-methyl modified nucleotide
  modified_base 88: mod_base = OTHER; note = 2'-O-methyl modified nucleotide
  modified_base 89: mod_base = OTHER; note = 2'-O-methyl modified nucleotide
  modified_base 90: mod_base = OTHER; note = 2'-O-methyl modified nucleotide
  modified_base 91: mod_base = OTHER; note = 2'-O-methyl modified nucleotide
  modified_base 92: mod_base = OTHER; note = 2'-O-methyl modified nucleotide
  modified_base 93: mod_base = OTHER; note = 2'-O-methyl modified nucleotide
  modified_base 94: mod_base = OTHER; note = 2'-O-methyl modified nucleotide
  modified_base 95: mod_base = OTHER; note = 2'-O-methyl modified nucleotide
  modified_base 96: mod_base = OTHER; note = 2'-O-methyl modified nucleotide
  modified_base 119: mod_base = OTHER; note = Nucleotide with phosphorothioate linkage
  modified_base 120: mod_base = OTHER; note = 2'-O-methyl modified nucleotide with phosphorothioate linkage
  modified_base 121: mod_base = OTHER; note = 2'-O-methyl modified nucleotide with phosphorothioate linkage
  modified_base 122: mod_base = OTHER; note = 2'-O-methyl modified nucleotide
gagaatcaaaatcggtgaatgttttagagctagaaatagcaagttaaaataaggctagtccgttatcaacttgaaaaagtggcaccgagtcggtgctgccttagttgaattcaccgattttg

SEQ ID NO: 16214 - RNA, 121 nt, synthetic construct
  source 1..121: mol_type = other RNA
  modified_base 1: mod_base = OTHER; note = 2'-O-methyl modified nucleotide with phosphorothioate linkage
  modified_base 2: mod_base = OTHER; note = 2'-O-methyl modified nucleotide with phosphorothioate linkage
  modified_base 3: mod_base = OTHER; note = 2'-O-methyl modified nucleotide with phosphorothioate linkage
  modified_base 29: mod_base = OTHER; note = 2'-O-methyl modified nucleotide
  modified_base 30: mod_base = OTHER; note = 2'-O-methyl modified nucleotide
  modified_base 31: mod_base = OTHER; note = 2'-O-methyl modified nucleotide
  modified_base 32: mod_base = OTHER; note = 2'-O-methyl modified nucleotide
  modified_base 33: mod_base = OTHER; note = 2'-O-methyl modified nucleotide
  modified_base 34: mod_base = OTHER; note = 2'-O-methyl modified nucleotide
  modified_base 35: mod_base = OTHER; note = 2'-O-methyl modified nucleotide
  modified_base 36: mod_base = OTHER; note = 2'-O-methyl modified nucleotide
  modified_base 37: mod_base = OTHER; note = 2'-O-methyl modified nucleotide
  modified_base 38: mod_base = OTHER; note = 2'-O-methyl modified nucleotide
  modified_base 39: mod_base = OTHER; note = 2'-O-methyl modified nucleotide
  modified_base 40: mod_base = OTHER; note = 2'-O-methyl modified nucleotide
  modified_base 69: mod_base = OTHER; note = 2'-O-methyl modified nucleotide
  modified_base 70: mod_base = OTHER; note = 2'-O-methyl modified nucleotide
  modified_base 71: mod_base = OTHER; note = 2'-O-methyl modified nucleotide
  modified_base 72: mod_base = OTHER; note = 2'-O-methyl modified nucleotide
  modified_base 73: mod_base = OTHER; note = 2'-O-methyl modified nucleotide
  modified_base 74: mod_base = OTHER; note = 2'-O-methyl modified nucleotide
  modified_base 75: mod_base = OTHER; note = 2'-O-methyl modified nucleotide
  modified_base 76: mod_base = OTHER; note = 2'-O-methyl modified nucleotide
  modified_base 77: mod_base = OTHER; note = 2'-O-methyl modified nucleotide
  modified_base 78: mod_base = OTHER; note = 2'-O-methyl modified nucleotide
  modified_base 79: mod_base = OTHER; note = 2'-O-methyl modified nucleotide
  modified_base 80: mod_base = OTHER; note = 2'-O-methyl modified nucleotide
  modified_base 81: mod_base = OTHER; note = 2'-O-methyl modified nucleotide
  modified_base 82: mod_base = OTHER; note = 2'-O-methyl modified nucleotide
  modified_base 83: mod_base = OTHER; note = 2'-O-methyl modified nucleotide
  modified_base 84: mod_base = OTHER; note = 2'-O-methyl modified nucleotide
  modified_base 85: mod_base = OTHER; note = 2'-O-methyl modified nucleotide
  modified_base 86: mod_base = OTHER; note = 2'-O-methyl modified nucleotide
  modified_base 87: mod_base = OTHER; note = 2'-O-methyl modified nucleotide
  modified_base 88: mod_base = OTHER; note = 2'-O-methyl modified nucleotide
  modified_base 89: mod_base = OTHER; note = 2'-O-methyl modified nucleotide
  modified_base 90: mod_base = OTHER; note = 2'-O-methyl modified nucleotide
  modified_base 91: mod_base = OTHER; note = 2'-O-methyl modified nucleotide
  modified_base 92: mod_base = OTHER; note = 2'-O-methyl modified nucleotide
  modified_base 93: mod_base = OTHER; note = 2'-O-methyl modified nucleotide
  modified_base 94: mod_base = OTHER; note = 2'-O-methyl modified nucleotide
  modified_base 95: mod_base = OTHER; note = 2'-O-methyl modified nucleotide
  modified_base 96: mod_base = OTHER; note = 2'-O-methyl modified nucleotide
  modified_base 118: mod_base = OTHER; note = Nucleotide with phosphorothioate linkage
  modified_base 119: mod_base = OTHER; note = 2'-O-methyl modified nucleotide with phosphorothioate linkage
  modified_base 120: mod_base = OTHER; note = 2'-O-methyl modified nucleotide with phosphorothioate linkage
  modified_base 121: mod_base = OTHER; note = 2'-O-methyl modified nucleotide
gagaatcaaaatcggtgaatgttttagagctagaaatagcaagttaaaataaggctagtccgttatcaacttgaaaaagtggcaccgagtcggtgctgccttagttgaattcaccgatttt

SEQ ID NO: 16215 - RNA, 120 nt, synthetic construct
  source 1..120: mol_type = other RNA
  modified_base 1: mod_base = OTHER; note = 2'-O-methyl modified nucleotide with phosphorothioate linkage
  modified_base 2: mod_base = OTHER; note = 2'-O-methyl modified nucleotide with phosphorothioate linkage
  modified_base 3: mod_base = OTHER; note = 2'-O-methyl modified nucleotide with phosphorothioate linkage
  modified_base 29: mod_base = OTHER; note = 2'-O-methyl modified nucleotide
  modified_base 30: mod_base = OTHER; note = 2'-O-methyl modified nucleotide
  modified_base 31: mod_base = OTHER; note = 2'-O-methyl modified nucleotide
  modified_base 32: mod_base = OTHER; note = 2'-O-methyl modified nucleotide
  modified_base 33: mod_base = OTHER; note = 2'-O-methyl modified nucleotide
  modified_base 34: mod_base = OTHER; note = 2'-O-methyl modified nucleotide
  modified_base 35: mod_base = OTHER; note = 2'-O-methyl modified nucleotide
  modified_base 36: mod_base = OTHER; note = 2'-O-methyl modified nucleotide
  modified_base 37: mod_base = OTHER; note = 2'-O-methyl modified nucleotide
  modified_base 38: mod_base = OTHER; note = 2'-O-methyl modified nucleotide
  modified_base 39: mod_base = OTHER; note = 2'-O-methyl modified nucleotide
  modified_base 40: mod_base = OTHER; note = 2'-O-methyl modified nucleotide
  modified_base 69: mod_base = OTHER; note = 2'-O-methyl modified nucleotide
  modified_base 70: mod_base = OTHER; note = 2'-O-methyl modified nucleotide
  modified_base 71: mod_base = OTHER; note = 2'-O-methyl modified nucleotide
  modified_base 72: mod_base = OTHER; note = 2'-O-methyl modified nucleotide
  modified_base 73: mod_base = OTHER; note = 2'-O-methyl modified nucleotide
  modified_base 74: mod_base = OTHER; note = 2'-O-methyl modified nucleotide
  modified_base 75: mod_base = OTHER; note = 2'-O-methyl modified nucleotide
  modified_base 76: mod_base = OTHER; note = 2'-O-methyl modified nucleotide
  modified_base 77: mod_base = OTHER; note = 2'-O-methyl modified nucleotide
  modified_base 78: mod_base = OTHER; note = 2'-O-methyl modified nucleotide
  modified_base 79: mod_base = OTHER; note = 2'-O-methyl modified nucleotide
  modified_base 80: mod_base = OTHER; note = 2'-O-methyl modified nucleotide
  modified_base 81: mod_base = OTHER; note = 2'-O-methyl modified nucleotide
  modified_base 82: mod_base = OTHER; note = 2'-O-methyl modified nucleotide
  modified_base 83: mod_base = OTHER; note = 2'-O-methyl modified nucleotide
  modified_base 84: mod_base = OTHER; note = 2'-O-methyl modified nucleotide
  modified_base 85: mod_base = OTHER; note = 2'-O-methyl modified nucleotide
  modified_base 86: mod_base = OTHER; note = 2'-O-methyl modified nucleotide
  modified_base 87: mod_base = OTHER; note = 2'-O-methyl modified nucleotide
  modified_base 88: mod_base = OTHER; note = 2'-O-methyl modified nucleotide
  modified_base 89: mod_base = OTHER; note = 2'-O-methyl modified nucleotide
  modified_base 90: mod_base = OTHER; note = 2'-O-methyl modified nucleotide
  modified_base 91: mod_base = OTHER; note = 2'-O-methyl modified nucleotide
  modified_base 92: mod_base = OTHER; note = 2'-O-methyl modified nucleotide
  modified_base 93: mod_base = OTHER; note = 2'-O-methyl modified nucleotide
  modified_base 94: mod_base = OTHER; note = 2'-O-methyl modified nucleotide
  modified_base 95: mod_base = OTHER; note = 2'-O-methyl modified nucleotide
  modified_base 96: mod_base = OTHER; note = 2'-O-methyl modified nucleotide
  modified_base 117: mod_base = OTHER; note = Nucleotide with phosphorothioate linkage
  modified_base 118: mod_base = OTHER; note = 2'-O-methyl modified nucleotide with phosphorothioate linkage
  modified_base 119: mod_base = OTHER; note = 2'-O-methyl modified nucleotide with phosphorothioate linkage
  modified_base 120: mod_base = OTHER; note = 2'-O-methyl modified nucleotide
gagaatcaaaatcggtgaatgttttagagctagaaatagcaagttaaaataaggctagtccgttatcaacttgaaaaagtggcaccgagtcggtgctgccttagttgaattcaccgattt

SEQ ID NO: 16216 - RNA, 119 nt, synthetic construct
  source 1..119: mol_type = other RNA
  modified_base 1: mod_base = OTHER; note = 2'-O-methyl modified nucleotide with phosphorothioate linkage
  modified_base 2: mod_base = OTHER; note = 2'-O-methyl modified nucleotide with phosphorothioate linkage
  modified_base 3: mod_base = OTHER; note = 2'-O-methyl modified nucleotide with phosphorothioate linkage
  modified_base 29: mod_base = OTHER; note = 2'-O-methyl modified nucleotide
  modified_base 30: mod_base = OTHER; note = 2'-O-methyl modified nucleotide
  modified_base 31: mod_base = OTHER; note = 2'-O-methyl modified nucleotide
  modified_base 32: mod_base = OTHER; note = 2'-O-methyl modified nucleotide
  modified_base 33: mod_base = OTHER; note = 2'-O-methyl modified nucleotide
  modified_base 34: mod_base = OTHER; note = 2'-O-methyl modified nucleotide
  modified_base 35: mod_base = OTHER; note = 2'-O-methyl modified nucleotide
  modified_base 36: mod_base = OTHER; note = 2'-O-methyl modified nucleotide
  modified_base 37: mod_base = OTHER; note = 2'-O-methyl modified nucleotide
  modified_base 38: mod_base = OTHER; note = 2'-O-methyl modified nucleotide
  modified_base 39: mod_base = OTHER; note = 2'-O-methyl modified nucleotide
  modified_base 40: mod_base = OTHER; note = 2'-O-methyl modified nucleotide
  modified_base 69: mod_base = OTHER; note = 2'-O-methyl modified nucleotide
  modified_base 70: mod_base = OTHER; note = 2'-O-methyl modified nucleotide
  modified_base 71: mod_base = OTHER; note = 2'-O-methyl modified nucleotide
  modified_base 72: mod_base = OTHER; note = 2'-O-methyl modified nucleotide
  modified_base 73: mod_base = OTHER; note = 2'-O-methyl modified nucleotide
  modified_base 74: mod_base = OTHER; note = 2'-O-methyl modified nucleotide
  modified_base 75: mod_base = OTHER; note = 2'-O-methyl modified nucleotide
  modified_base 76: mod_base = OTHER; note = 2'-O-methyl modified nucleotide
  modified_base 77: mod_base = OTHER; note = 2'-O-methyl modified nucleotide
  modified_base 78: mod_base = OTHER; note = 2'-O-methyl modified nucleotide
  modified_base 79: mod_base = OTHER; note = 2'-O-methyl modified nucleotide
  modified_base 80: mod_base = OTHER; note = 2'-O-methyl modified nucleotide
  modified_base 81: mod_base = OTHER; note = 2'-O-methyl modified nucleotide
  modified_base 82: mod_base = OTHER; note = 2'-O-methyl modified nucleotide
  modified_base 83: mod_base = OTHER; note = 2'-O-methyl modified nucleotide
  modified_base 84: mod_base = OTHER; note = 2'-O-methyl modified nucleotide
  modified_base 85: mod_base = OTHER; note = 2'-O-methyl modified nucleotide
  modified_base 86: mod_base = OTHER; note = 2'-O-methyl modified nucleotide
  modified_base 87: mod_base = OTHER; note = 2'-O-methyl modified nucleotide
  modified_base 88: mod_base = OTHER; note = 2'-O-methyl modified nucleotide
  modified_base 89: mod_base = OTHER; note = 2'-O-methyl modified nucleotide
  modified_base 90: mod_base = OTHER; note = 2'-O-methyl modified nucleotide
  modified_base 91: mod_base = OTHER; note = 2'-O-methyl modified nucleotide
  modified_base 92: mod_base = OTHER; note = 2'-O-methyl modified nucleotide
  modified_base 93: mod_base = OTHER; note = 2'-O-methyl modified nucleotide
  modified_base 94: mod_base = OTHER; note = 2'-O-methyl modified nucleotide
  modified_base 95: mod_base = OTHER; note = 2'-O-methyl modified nucleotide
  modified_base 96: mod_base = OTHER; note = 2'-O-methyl modified nucleotide
  modified_base 116: mod_base = OTHER; note = Nucleotide with phosphorothioate linkage
  modified_base 117: mod_base = OTHER; note = 2'-O-methyl modified nucleotide with phosphorothioate linkage
  modified_base 118: mod_base = OTHER; note = 2'-O-methyl modified nucleotide with phosphorothioate linkage
  modified_base 119: mod_base = OTHER; note = 2'-O-methyl modified nucleotide
gagaatcaaaatcggtgaatgttttagagctagaaatagcaagttaaaataaggctagtccgttatcaacttgaaaaagtggcaccgagtcggtgctgccttagttgaattcaccgatt

SEQ ID NO: 16217 - RNA, 126 nt, synthetic construct
  source 1..126: mol_type = other RNA
  modified_base 1: mod_base = OTHER; note = 2'-O-methyl modified nucleotide with phosphorothioate linkage
  modified_base 2: mod_base = OTHER; note = 2'-O-methyl modified nucleotide with phosphorothioate linkage
  modified_base 3: mod_base = OTHER; note = 2'-O-methyl modified nucleotide with phosphorothioate linkage
  modified_base 29: mod_base = OTHER; note = 2'-O-methyl modified nucleotide
  modified_base 30: mod_base = OTHER; note = 2'-O-methyl modified nucleotide
  modified_base 31: mod_base = OTHER; note = 2'-O-methyl modified nucleotide
  modified_base 32: mod_base = OTHER; note = 2'-O-methyl modified nucleotide
  modified_base 33: mod_base = OTHER; note = 2'-O-methyl modified nucleotide
  modified_base 34: mod_base = OTHER; note = 2'-O-methyl modified nucleotide
  modified_base 35: mod_base = OTHER; note = 2'-O-methyl modified nucleotide
  modified_base 36: mod_base = OTHER; note = 2'-O-methyl modified nucleotide
  modified_base 37: mod_base = OTHER; note = 2'-O-methyl modified nucleotide
  modified_base 38: mod_base = OTHER; note = 2'-O-methyl modified nucleotide
  modified_base 39: mod_base = OTHER; note = 2'-O-methyl modified nucleotide
  modified_base 40: mod_base = OTHER; note = 2'-O-methyl modified nucleotide
  modified_base 69: mod_base = OTHER; note = 2'-O-methyl modified nucleotide
  modified_base 70: mod_base = OTHER; note = 2'-O-methyl modified nucleotide
  modified_base 71: mod_base = OTHER; note = 2'-O-methyl modified nucleotide
  modified_base 72: mod_base = OTHER; note = 2'-O-methyl modified nucleotide
  modified_base 73: mod_base = OTHER; note = 2'-O-methyl modified nucleotide
  modified_base 74: mod_base = OTHER; note = 2'-O-methyl modified nucleotide
  modified_base 75: mod_base = OTHER; note = 2'-O-methyl modified nucleotide
  modified_base 76: mod_base = OTHER; note = 2'-O-methyl modified nucleotide
  modified_base 77: mod_base = OTHER; note = 2'-O-methyl modified nucleotide
  modified_base 78: mod_base = OTHER; note = 2'-O-methyl modified nucleotide
  modified_base 79: mod_base = OTHER; note = 2'-O-methyl modified nucleotide
  modified_base 80: mod_base = OTHER; note = 2'-O-methyl modified nucleotide
  modified_base 81: mod_base = OTHER; note = 2'-O-methyl modified nucleotide
  modified_base 82: mod_base = OTHER; note = 2'-O-methyl modified nucleotide
  modified_base 83: mod_base = OTHER; note = 2'-O-methyl modified nucleotide
  modified_base 84: mod_base = OTHER; note = 2'-O-methyl modified nucleotide
  modified_base 85: mod_base = OTHER; note = 2'-O-methyl modified nucleotide
  modified_base 86: mod_base = OTHER; note = 2'-O-methyl modified nucleotide
  modified_base 87: mod_base = OTHER; note = 2'-O-methyl modified nucleotide
  modified_base 88: mod_base = OTHER; note = 2'-O-methyl modified nucleotide
  modified_base 89: mod_base = OTHER; note = 2'-O-methyl modified nucleotide
  modified_base 90: mod_base = OTHER; note = 2'-O-methyl modified nucleotide
  modified_base 91: mod_base = OTHER; note = 2'-O-methyl modified nucleotide
  modified_base 92: mod_base = OTHER; note = 2'-O-methyl modified nucleotide
  modified_base 93: mod_base = OTHER; note = 2'-O-methyl modified nucleotide
  modified_base 94: mod_base = OTHER; note = 2'-O-methyl modified nucleotide
  modified_base 95: mod_base = OTHER; note = 2'-O-methyl modified nucleotide
  modified_base 96: mod_base = OTHER; note = 2'-O-methyl modified nucleotide
  modified_base 123: mod_base = OTHER; note = Nucleotide with phosphorothioate linkage
  modified_base 124: mod_base = OTHER; note = 2'-O-methyl modified nucleotide with phosphorothioate linkage
  modified_base 125: mod_base = OTHER; note = 2'-O-methyl modified nucleotide with phosphorothioate linkage
  modified_base 126: mod_base = OTHER; note = 2'-O-methyl modified nucleotide
gagaatcaaaatcggtgaatgttttagagctagaaatagcaagttaaaataaggctagtccgttatcaacttgaaaaagtggcaccgagtcggtgctctgccttagttgaattcaccgattttgat

SEQ ID NO: 16218 - RNA, 125 nt, synthetic construct
  source 1..125: mol_type = other RNA
  modified_base 1: mod_base = OTHER; note = 2'-O-methyl modified nucleotide with phosphorothioate linkage
  modified_base 2: mod_base = OTHER; note = 2'-O-methyl modified nucleotide with phosphorothioate linkage
  modified_base 3: mod_base = OTHER; note = 2'-O-methyl modified nucleotide with phosphorothioate linkage
  modified_base 29: mod_base = OTHER; note = 2'-O-methyl modified nucleotide
  modified_base 30: mod_base = OTHER; note = 2'-O-methyl modified nucleotide
  modified_base 31: mod_base = OTHER; note = 2'-O-methyl modified nucleotide
  modified_base 32: mod_base = OTHER; note = 2'-O-methyl modified nucleotide
  modified_base 33: mod_base = OTHER; note = 2'-O-methyl modified nucleotide
  modified_base 34: mod_base = OTHER; note = 2'-O-methyl modified nucleotide
  modified_base 35: mod_base = OTHER; note = 2'-O-methyl modified nucleotide
  modified_base 36: mod_base = OTHER; note = 2'-O-methyl modified nucleotide
  modified_base 37: mod_base = OTHER; note = 2'-O-methyl modified nucleotide
  modified_base 38: mod_base = OTHER; note = 2'-O-methyl modified nucleotide
  modified_base 39: mod_base = OTHER; note = 2'-O-methyl modified nucleotide
  modified_base 40: mod_base = OTHER; note = 2'-O-methyl modified nucleotide
  modified_base 69: mod_base = OTHER; note = 2'-O-methyl modified nucleotide
  modified_base 70: mod_base = OTHER; note = 2'-O-methyl modified nucleotide
  modified_base 71: mod_base = OTHER; note = 2'-O-methyl modified nucleotide
  modified_base 72: mod_base = OTHER; note = 2'-O-methyl modified nucleotide
  modified_base 73: mod_base = OTHER; note = 2'-O-methyl modified nucleotide
  modified_base 74: mod_base = OTHER; note = 2'-O-methyl modified nucleotide
  modified_base 75: mod_base = OTHER; note = 2'-O-methyl modified nucleotide
  modified_base 76: mod_base = OTHER; note = 2'-O-methyl modified nucleotide
  modified_base 77: mod_base = OTHER; note = 2'-O-methyl modified nucleotide
  modified_base 78: mod_base = OTHER; note = 2'-O-methyl modified nucleotide
  modified_base 79: mod_base = OTHER; note = 2'-O-methyl modified nucleotide
  modified_base 80: mod_base = OTHER; note = 2'-O-methyl modified nucleotide
  modified_base 81: mod_base = OTHER; note = 2'-O-methyl modified nucleotide
  modified_base 82: mod_base = OTHER; note = 2'-O-methyl modified nucleotide
  modified_base 83: mod_base = OTHER; note = 2'-O-methyl modified nucleotide
  modified_base 84: mod_base = OTHER; note = 2'-O-methyl modified nucleotide
  modified_base 85: mod_base = OTHER; note = 2'-O-methyl modified nucleotide
  modified_base 86: mod_base = OTHER; note = 2'-O-methyl modified nucleotide
  modified_base 87: mod_base = OTHER; note = 2'-O-methyl modified nucleotide
  modified_base 88: mod_base = OTHER; note = 2'-O-methyl modified nucleotide
  modified_base 89: mod_base = OTHER; note = 2'-O-methyl modified nucleotide
  modified_base 90: mod_base = OTHER; note = 2'-O-methyl modified nucleotide
  modified_base 91: mod_base = OTHER; note = 2'-O-methyl modified nucleotide
  modified_base 92: mod_base = OTHER; note = 2'-O-methyl modified nucleotide
  modified_base 93: mod_base = OTHER; note = 2'-O-methyl modified nucleotide
  modified_base 94: mod_base = OTHER; note = 2'-O-methyl modified nucleotide
  modified_base 95: mod_base = OTHER; note = 2'-O-methyl modified nucleotide
  modified_base 96: mod_base = OTHER; note = 2'-O-methyl modified nucleotide
  modified_base 122: mod_base = OTHER; note = Nucleotide with phosphorothioate linkage
  modified_base 123: mod_base = OTHER; note = 2'-O-methyl modified nucleotide with phosphorothioate linkage
  modified_base 124: mod_base = OTHER; note = 2'-O-methyl modified nucleotide with phosphorothioate linkage
  modified_base 125: mod_base = OTHER; note = 2'-O-methyl modified nucleotide
gagaatcaaaatcggtgaatgttttagagctagaaatagcaagttaaaataaggctagtccgttatcaacttgaaaaagtggcaccgagtcggtgctctgccttagttgaattcaccgattttga

SEQ ID NO: 16219 - RNA, 124 nt, synthetic construct
  source 1..124: mol_type = other RNA
  modified_base 1: mod_base = OTHER; note = 2'-O-methyl modified nucleotide with phosphorothioate linkage
  modified_base 2: mod_base = OTHER; note = 2'-O-methyl modified nucleotide with phosphorothioate linkage
  modified_base 3: mod_base = OTHER; note = 2'-O-methyl modified nucleotide with phosphorothioate linkage
  modified_base 29: mod_base = OTHER; note = 2'-O-methyl modified nucleotide
  modified_base 30: mod_base = OTHER; note = 2'-O-methyl modified nucleotide
  modified_base 31: mod_base = OTHER; note = 2'-O-methyl modified nucleotide
  modified_base 32: mod_base = OTHER; note = 2'-O-methyl modified nucleotide
  modified_base 33: mod_base = OTHER; note = 2'-O-methyl modified nucleotide
  modified_base 34: mod_base = OTHER; note = 2'-O-methyl modified nucleotide
  modified_base 35: mod_base = OTHER; note = 2'-O-methyl modified nucleotide
  modified_base 36: mod_base = OTHER; note = 2'-O-methyl modified nucleotide
  modified_base 37: mod_base = OTHER; note = 2'-O-methyl modified nucleotide
  modified_base 38: mod_base = OTHER; note = 2'-O-methyl modified nucleotide
  modified_base 39: mod_base = OTHER; note = 2'-O-methyl modified nucleotide
  modified_base 40: mod_base = OTHER; note = 2'-O-methyl modified nucleotide
  modified_base 69: mod_base = OTHER; note = 2'-O-methyl modified nucleotide
  modified_base 70: mod_base = OTHER; note = 2'-O-methyl modified nucleotide
  modified_base 71: mod_base = OTHER; note = 2'-O-methyl modified nucleotide
  modified_base 72: mod_base = OTHER; note = 2'-O-methyl modified nucleotide
  modified_base 73: mod_base = OTHER; note = 2'-O-methyl modified nucleotide
  modified_base 74: mod_base = OTHER; note = 2'-O-methyl modified nucleotide
  modified_base 75: mod_base = OTHER; note = 2'-O-methyl modified nucleotide
  modified_base 76: mod_base = OTHER; note = 2'-O-methyl modified nucleotide
  modified_base 77: mod_base = OTHER; note = 2'-O-methyl modified nucleotide
  modified_base 78: mod_base = OTHER; note = 2'-O-methyl modified nucleotide
  modified_base 79: mod_base = OTHER; note = 2'-O-methyl modified nucleotide
  modified_base 80: mod_base = OTHER; note = 2'-O-methyl modified nucleotide
  modified_base 81: mod_base = OTHER; note = 2'-O-methyl modified nucleotide
  modified_base 82: mod_base = OTHER; note = 2'-O-methyl modified nucleotide
  modified_base 83: mod_base = OTHER; note = 2'-O-methyl modified nucleotide
  modified_base 84: mod_base = OTHER; note = 2'-O-methyl modified nucleotide
  modified_base 85: mod_base = OTHER; note = 2'-O-methyl modified nucleotide
  modified_base 86: mod_base = OTHER; note = 2'-O-methyl modified nucleotide
  modified_base 87: mod_base = OTHER; note = 2'-O-methyl modified nucleotide
  modified_base 88: mod_base = OTHER; note = 2'-O-methyl modified nucleotide
  modified_base 89: mod_base = OTHER; note = 2'-O-methyl modified nucleotide
  modified_base 90: mod_base = OTHER; note = 2'-O-methyl modified nucleotide
  modified_base 91: mod_base = OTHER; note = 2'-O-methyl modified nucleotide
  modified_base 92: mod_base = OTHER; note = 2'-O-methyl modified nucleotide
  modified_base 93: mod_base = OTHER; note = 2'-O-methyl modified nucleotide
  modified_base 94: mod_base = OTHER; note = 2'-O-methyl modified nucleotide
  modified_base 95: mod_base = OTHER; note = 2'-O-methyl modified nucleotide
  modified_base 96: mod_base = OTHER; note = 2'-O-methyl modified nucleotide
  modified_base 121: mod_base = OTHER; note = Nucleotide with phosphorothioate linkage
  modified_base 122: mod_base = OTHER; note = 2'-O-methyl modified nucleotide with phosphorothioate linkage
  modified_base 123: mod_base = OTHER; note = 2'-O-methyl modified nucleotide with phosphorothioate linkage
  modified_base 124: mod_base = OTHER; note = 2'-O-methyl modified nucleotide
gagaatcaaaatcggtgaatgttttagagctagaaatagcaagttaaaataaggctagtccgttatcaacttgaaaaagtggcaccgagtcggtgctctgccttagttgaattcaccgattttg

SEQ ID NO: 16220 - RNA, 123 nt, synthetic construct
  source 1..123: mol_type = other RNA
  modified_base 1: mod_base = OTHER; note = 2'-O-methyl modified nucleotide with phosphorothioate linkage
  modified_base 2: mod_base = OTHER; note = 2'-O-methyl modified nucleotide with phosphorothioate linkage
  modified_base 3: mod_base = OTHER; note = 2'-O-methyl modified nucleotide with phosphorothioate linkage
  modified_base 29: mod_base = OTHER; note = 2'-O-methyl modified nucleotide
  modified_base 30: mod_base = OTHER; note = 2'-O-methyl modified nucleotide
  modified_base 31: mod_base = OTHER; note = 2'-O-methyl modified nucleotide
  modified_base 32: mod_base = OTHER; note = 2'-O-methyl modified nucleotide
  modified_base 33: mod_base = OTHER; note = 2'-O-methyl modified nucleotide
  modified_base 34: mod_base = OTHER; note = 2'-O-methyl modified nucleotide
  modified_base 35: mod_base = OTHER; note = 2'-O-methyl modified nucleotide
  modified_base 36: mod_base = OTHER; note = 2'-O-methyl modified nucleotide
  modified_base 37: mod_base = OTHER; note = 2'-O-methyl modified nucleotide
  modified_base 38: mod_base = OTHER; note = 2'-O-methyl modified nucleotide
  modified_base 39: mod_base = OTHER; note = 2'-O-methyl modified nucleotide
  modified_base 40: mod_base = OTHER; note = 2'-O-methyl modified nucleotide
  modified_base 69: mod_base = OTHER; note = 2'-O-methyl modified nucleotide
  modified_base 70: mod_base = OTHER; note = 2'-O-methyl modified nucleotide
  modified_base 71: mod_base = OTHER; note = 2'-O-methyl modified nucleotide
  modified_base 72: mod_base = OTHER; note = 2'-O-methyl modified nucleotide
  modified_base 73: mod_base = OTHER; note = 2'-O-methyl modified nucleotide
  modified_base 74: mod_base = OTHER; note = 2'-O-methyl modified nucleotide
  modified_base 75: mod_base = OTHER; note = 2'-O-methyl modified nucleotide
  modified_base 76: mod_base = OTHER; note = 2'-O-methyl modified nucleotide
  modified_base 77: mod_base = OTHER; note = 2'-O-methyl modified nucleotide
  modified_base 78: mod_base = OTHER; note = 2'-O-methyl modified nucleotide
  modified_base 79: mod_base = OTHER; note = 2'-O-methyl modified nucleotide
  modified_base 80: mod_base = OTHER; note = 2'-O-methyl modified nucleotide
  modified_base 81: mod_base = OTHER; note = 2'-O-methyl modified nucleotide
  modified_base 82: mod_base = OTHER; note = 2'-O-methyl modified nucleotide
  modified_base 83: mod_base = OTHER; note = 2'-O-methyl modified nucleotide
  modified_base 84: mod_base = OTHER; note = 2'-O-methyl modified nucleotide
  modified_base 85: mod_base = OTHER; note = 2'-O-methyl modified nucleotide
  modified_base 86: mod_base = OTHER; note = 2'-O-methyl modified nucleotide
  modified_base 87: mod_base = OTHER; note = 2'-O-methyl modified nucleotide
  modified_base 88: mod_base = OTHER; note = 2'-O-methyl modified nucleotide
  modified_base 89: mod_base = OTHER; note = 2'-O-methyl modified nucleotide
  modified_base 90: mod_base = OTHER; note = 2'-O-methyl modified nucleotide
  modified_base 91: mod_base = OTHER; note = 2'-O-methyl modified nucleotide
  modified_base 92: mod_base = OTHER; note = 2'-O-methyl modified nucleotide
  modified_base 93: mod_base = OTHER; note = 2'-O-methyl modified nucleotide
  modified_base 94: mod_base = OTHER; note = 2'-O-methyl modified nucleotide
  modified_base 95: mod_base = OTHER; note = 2'-O-methyl modified nucleotide
  modified_base 96: mod_base = OTHER; note = 2'-O-methyl modified nucleotide
  modified_base 120: mod_base = OTHER; note = Nucleotide with phosphorothioate linkage
  modified_base 121: mod_base = OTHER; note = 2'-O-methyl modified nucleotide with phosphorothioate linkage
  modified_base 122: mod_base = OTHER; note = 2'-O-methyl modified nucleotide with phosphorothioate linkage
  modified_base 123: mod_base = OTHER; note = 2'-O-methyl modified nucleotide
gagaatcaaaatcggtgaatgttttagagctagaaatagcaagttaaaataaggctagtccgttatcaacttgaaaaagtggcaccgagtcggtgctctgccttagttgaattcaccgatttt

SEQ ID NO: 16221 - RNA, 122 nt, synthetic construct
  source 1..122: mol_type = other RNA
  modified_base 1: mod_base = OTHER; note = 2'-O-methyl modified nucleotide with phosphorothioate linkage
  modified_base 2: mod_base = OTHER; note = 2'-O-methyl modified nucleotide with phosphorothioate linkage
  modified_base 3: mod_base = OTHER; note = 2'-O-methyl modified nucleotide with phosphorothioate linkage
  modified_base 29: mod_base = OTHER; note = 2'-O-methyl modified nucleotide
  modified_base 30: mod_base = OTHER; note = 2'-O-methyl modified nucleotide
  modified_base 31: mod_base = OTHER; note = 2'-O-methyl modified nucleotide
  modified_base 32: mod_base = OTHER; note = 2'-O-methyl modified nucleotide
  modified_base 33: mod_base = OTHER; note = 2'-O-methyl modified nucleotide
  modified_base 34: mod_base = OTHER; note = 2'-O-methyl modified nucleotide
  modified_base 35: mod_base = OTHER; note = 2'-O-methyl modified nucleotide
  modified_base 36: mod_base = OTHER; note = 2'-O-methyl modified nucleotide
  modified_base 37: mod_base = OTHER; note = 2'-O-methyl modified nucleotide
  modified_base 38: mod_base = OTHER; note = 2'-O-methyl modified nucleotide
  modified_base 39: mod_base = OTHER; note = 2'-O-methyl modified nucleotide
  modified_base 40: mod_base = OTHER; note = 2'-O-methyl modified nucleotide
  modified_base 69: mod_base = OTHER; note = 2'-O-methyl modified nucleotide
  modified_base 70: mod_base = OTHER; note = 2'-O-methyl modified nucleotide
  modified_base 71: mod_base = OTHER; note = 2'-O-methyl modified nucleotide
  modified_base 72: mod_base = OTHER; note = 2'-O-methyl modified nucleotide
  modified_base 73: mod_base = OTHER; note = 2'-O-methyl modified nucleotide
  modified_base 74: mod_base = OTHER; note = 2'-O-methyl modified nucleotide
  modified_base 75: mod_base = OTHER; note = 2'-O-methyl modified nucleotide
  modified_base 76: mod_base = OTHER; note = 2'-O-methyl modified nucleotide
  modified_base 77: mod_base = OTHER; note = 2'-O-methyl modified nucleotide
  modified_base 78: mod_base = OTHER; note = 2'-O-methyl modified nucleotide
  modified_base 79: mod_base = OTHER; note = 2'-O-methyl modified nucleotide
  modified_base 80: mod_base = OTHER; note = 2'-O-methyl modified nucleotide
  modified_base 81: mod_base = OTHER; note = 2'-O-methyl modified nucleotide
  modified_base 82: mod_base = OTHER; note = 2'-O-methyl modified nucleotide
  modified_base 83: mod_base = OTHER; note = 2'-O-methyl modified nucleotide
  modified_base 84: mod_base = OTHER; note = 2'-O-methyl modified nucleotide
  modified_base 85: mod_base = OTHER; note = 2'-O-methyl modified nucleotide
  modified_base 86: mod_base = OTHER; note = 2'-O-methyl modified nucleotide
  modified_base 87: mod_base = OTHER; note = 2'-O-methyl modified nucleotide
  modified_base 88: mod_base = OTHER; note = 2'-O-methyl modified nucleotide
  modified_base 89: mod_base = OTHER; note = 2'-O-methyl modified nucleotide
  modified_base 90: mod_base = OTHER; note = 2'-O-methyl modified nucleotide
  modified_base 91: mod_base = OTHER; note = 2'-O-methyl modified nucleotide
  modified_base 92: mod_base = OTHER; note = 2'-O-methyl modified nucleotide
  modified_base 93: mod_base = OTHER; note = 2'-O-methyl modified nucleotide
  modified_base 94: mod_base = OTHER; note = 2'-O-methyl modified nucleotide
  modified_base 95: mod_base = OTHER; note = 2'-O-methyl modified nucleotide
  modified_base 96: mod_base = OTHER; note = 2'-O-methyl modified nucleotide
  modified_base 119: mod_base = OTHER; note = Nucleotide with phosphorothioate linkage
  modified_base 120: mod_base = OTHER; note = 2'-O-methyl modified nucleotide with phosphorothioate linkage
  modified_base 121: mod_base = OTHER; note = 2'-O-methyl modified nucleotide with phosphorothioate linkage
  modified_base 122: mod_base = OTHER; note = 2'-O-methyl modified nucleotide
gagaatcaaaatcggtgaatgttttagagctagaaatagcaagttaaaataaggctagtccgttatcaacttgaaaaagtggcaccgagtcggtgctctgccttagttgaattcaccgattt

SEQ ID NO: 16222 - RNA, 121 nt, synthetic construct
  source 1..121: mol_type = other RNA
  modified_base 1: mod_base = OTHER; note = 2'-O-methyl modified nucleotide with phosphorothioate linkage
  modified_base 2: mod_base = OTHER; note = 2'-O-methyl modified nucleotide with phosphorothioate linkage
  modified_base 3: mod_base = OTHER; note = 2'-O-methyl modified nucleotide with phosphorothioate linkage
  modified_base 29: mod_base = OTHER; note = 2'-O-methyl modified nucleotide
  modified_base 30: mod_base = OTHER; note = 2'-O-methyl modified nucleotide
  modified_base 31: mod_base = OTHER; note = 2'-O-methyl modified nucleotide
  modified_base 32: mod_base = OTHER; note = 2'-O-methyl modified nucleotide
  modified_base 33: mod_base = OTHER; note = 2'-O-methyl modified nucleotide
  modified_base 34: mod_base = OTHER; note = 2'-O-methyl modified nucleotide
  modified_base 35: mod_base = OTHER; note = 2'-O-methyl modified nucleotide
  modified_base 36: mod_base = OTHER; note = 2'-O-methyl modified nucleotide
  modified_base 37: mod_base = OTHER; note = 2'-O-methyl modified nucleotide
  modified_base 38: mod_base = OTHER; note = 2'-O-methyl modified nucleotide
  modified_base 39: mod_base = OTHER; note = 2'-O-methyl modified nucleotide
  modified_base 40: mod_base = OTHER; note = 2'-O-methyl modified nucleotide
  modified_base 69: mod_base = OTHER; note = 2'-O-methyl modified nucleotide
  modified_base 70: mod_base = OTHER; note = 2'-O-methyl modified nucleotide
  modified_base 71: mod_base = OTHER; note = 2'-O-methyl modified nucleotide
  modified_base 72: mod_base = OTHER; note = 2'-O-methyl modified nucleotide
  modified_base 73: mod_base = OTHER; note = 2'-O-methyl modified nucleotide
  modified_base 74: mod_base = OTHER; note = 2'-O-methyl modified nucleotide
  modified_base 75: mod_base = OTHER; note = 2'-O-methyl modified nucleotide
  modified_base 76: mod_base = OTHER; note = 2'-O-methyl modified nucleotide
  modified_base 77: mod_base = OTHER; note = 2'-O-methyl modified nucleotide
  modified_base 78: mod_base = OTHER; note = 2'-O-methyl modified nucleotide
  modified_base 79: mod_base = OTHER; note = 2'-O-methyl modified nucleotide
  modified_base 80: mod_base = OTHER; note = 2'-O-methyl modified nucleotide
  modified_base 81: mod_base = OTHER; note = 2'-O-methyl modified nucleotide
  modified_base 82: mod_base = OTHER; note = 2'-O-methyl modified nucleotide
  modified_base 83: mod_base = OTHER; note = 2'-O-methyl modified nucleotide
  modified_base 84: mod_base = OTHER; note = 2'-O-methyl modified nucleotide
  modified_base 85: mod_base = OTHER; note = 2'-O-methyl modified nucleotide
  modified_base 86: mod_base = OTHER; note = 2'-O-methyl modified nucleotide
  modified_base 87: mod_base = OTHER; note = 2'-O-methyl modified nucleotide
  modified_base 88: mod_base = OTHER; note = 2'-O-methyl modified nucleotide
  modified_base 89: mod_base = OTHER; note = 2'-O-methyl modified nucleotide
  modified_base 90: mod_base = OTHER; note = 2'-O-methyl modified nucleotide
  modified_base 91: mod_base = OTHER; note = 2'-O-methyl modified nucleotide
  modified_base 92: mod_base = OTHER; note = 2'-O-methyl modified nucleotide
  modified_base 93: mod_base = OTHER; note = 2'-O-methyl modified nucleotide
  modified_base 94: mod_base = OTHER; note = 2'-O-methyl modified nucleotide
  modified_base 95: mod_base = OTHER; note = 2'-O-methyl modified nucleotide
  modified_base 96: mod_base = OTHER; note = 2'-O-methyl modified nucleotide
  modified_base 118: mod_base = OTHER; note = Nucleotide with phosphorothioate linkage
  modified_base 119: mod_base = OTHER; note = 2'-O-methyl modified nucleotide with phosphorothioate linkage
  modified_base 120: mod_base = OTHER; note = 2'-O-methyl modified nucleotide with phosphorothioate linkage
  modified_base 121: mod_base = OTHER; note = 2'-O-methyl modified nucleotide
gagaatcaaaatcggtgaatgttttagagctagaaatagcaagttaaaataaggctagtccgttatcaacttgaaaaagtggcaccgagtcggtgctctgccttagttgaattcaccgatt

SEQ ID NO: 16223 - RNA, 128 nt, synthetic construct
  source 1..128: mol_type = other RNA
  modified_base 1: mod_base = OTHER; note = 2'-O-methyl modified nucleotide with phosphorothioate linkage
  modified_base 2: mod_base = OTHER; note = 2'-O-methyl modified nucleotide with phosphorothioate linkage
  modified_base 3: mod_base = OTHER; note = 2'-O-methyl modified nucleotide with phosphorothioate linkage
  modified_base 29: mod_base = OTHER; note = 2'-O-methyl modified nucleotide
  modified_base 30: mod_base = OTHER; note = 2'-O-methyl modified nucleotide
  modified_base 31: mod_base = OTHER; note = 2'-O-methyl modified nucleotide
  modified_base 32: mod_base = OTHER; note = 2'-O-methyl modified nucleotide
  modified_base 33: mod_base = OTHER; note = 2'-O-methyl modified nucleotide
  modified_base 34: mod_base = OTHER; note = 2'-O-methyl modified nucleotide
  modified_base 35: mod_base = OTHER; note = 2'-O-methyl modified nucleotide
  modified_base 36: mod_base = OTHER; note = 2'-O-methyl modified nucleotide
  modified_base 37: mod_base = OTHER; note = 2'-O-methyl modified nucleotide
  modified_base 38: mod_base = OTHER; note = 2'-O-methyl modified nucleotide
  modified_base 39: mod_base = OTHER; note = 2'-O-methyl modified nucleotide
  modified_base 40: mod_base = OTHER; note = 2'-O-methyl modified nucleotide
  modified_base 69: mod_base = OTHER; note = 2'-O-methyl modified nucleotide
  modified_base 70: mod_base = OTHER; note = 2'-O-methyl modified nucleotide
  modified_base 71: mod_base = OTHER; note = 2'-O-methyl modified nucleotide
  modified_base 72: mod_base = OTHER; note = 2'-O-methyl modified nucleotide
  modified_base 73: mod_base = OTHER; note = 2'-O-methyl modified nucleotide
  modified_base 74: mod_base = OTHER; note = 2'-O-methyl modified nucleotide
  modified_base 75: mod_base = OTHER; note = 2'-O-methyl modified nucleotide
  modified_base 76: mod_base = OTHER; note = 2'-O-methyl modified nucleotide
  modified_base 77: mod_base = OTHER; note = 2'-O-methyl modified nucleotide
  modified_base 78: mod_base = OTHER; note = 2'-O-methyl modified nucleotide
  modified_base 79: mod_base = OTHER; note = 2'-O-methyl modified nucleotide
  modified_base 80: mod_base = OTHER; note = 2'-O-methyl modified nucleotide
  modified_base 81: mod_base = OTHER; note = 2'-O-methyl modified nucleotide
  modified_base 82: mod_base = OTHER; note = 2'-O-methyl modified nucleotide
  modified_base 83: mod_base = OTHER; note = 2'-O-methyl modified nucleotide
  modified_base 84: mod_base = OTHER; note = 2'-O-methyl modified nucleotide
  modified_base 85: mod_base = OTHER; note = 2'-O-methyl modified nucleotide
  modified_base 86: mod_base = OTHER; note = 2'-O-methyl modified nucleotide
  modified_base 87: mod_base = OTHER; note = 2'-O-methyl modified nucleotide
  modified_base 88: mod_base = OTHER; note = 2'-O-methyl modified nucleotide
  modified_base 89: mod_base = OTHER; note = 2'-O-methyl modified nucleotide
  modified_base 90: mod_base = OTHER; note = 2'-O-methyl modified nucleotide
  modified_base 91: mod_base = OTHER; note = 2'-O-methyl modified nucleotide
  modified_base 92: mod_base = OTHER; note = 2'-O-methyl modified nucleotide
  modified_base 93: mod_base = OTHER; note = 2'-O-methyl modified nucleotide
  modified_base 94: mod_base = OTHER; note = 2'-O-methyl modified nucleotide
  modified_base 95: mod_base = OTHER; note = 2'-O-methyl modified nucleotide
  modified_base 96: mod_base = OTHER; note = 2'-O-methyl modified nucleotide
  modified_base 125: mod_base = OTHER; note = Nucleotide with phosphorothioate linkage
  modified_base 126: mod_base = OTHER; note = 2'-O-methyl modified nucleotide with phosphorothioate linkage
  modified_base 127: mod_base = OTHER; note = 2'-O-methyl modified nucleotide with phosphorothioate linkage
  modified_base 128: mod_base = OTHER; note = 2'-O-methyl modified nucleotide
gagaatcaaaatcggtgaatgttttagagctagaaatagcaagttaaaataaggctagtccgttatcaacttgaaaaagtggcaccgagtcggtgctgtctgccttagttgaattcaccgattttgat

SEQ ID NO: 16224 - RNA, 127 nt, synthetic construct
  source 1..127: mol_type = other RNA
  modified_base 1: mod_base = OTHER; note = 2'-O-methyl modified nucleotide with phosphorothioate linkage
  modified_base 2: mod_base = OTHER; note = 2'-O-methyl modified nucleotide with phosphorothioate linkage
  modified_base 3: mod_base = OTHER; note = 2'-O-methyl modified nucleotide with phosphorothioate linkage
  modified_base 29: mod_base = OTHER; note = 2'-O-methyl modified nucleotide
  modified_base 30: mod_base = OTHER; note = 2'-O-methyl modified nucleotide
  modified_base 31: mod_base = OTHER; note = 2'-O-methyl modified nucleotide
  modified_base 32: mod_base = OTHER; note = 2'-O-methyl modified nucleotide
  modified_base 33: mod_base = OTHER; note = 2'-O-methyl modified nucleotide
  modified_base 34: mod_base = OTHER; note = 2'-O-methyl modified nucleotide
  modified_base 35: mod_base = OTHER; note = 2'-O-methyl modified nucleotide
  modified_base 36: mod_base = OTHER; note = 2'-O-methyl modified nucleotide
  modified_base 37: mod_base = OTHER; note = 2'-O-methyl modified nucleotide
  modified_base 38: mod_base = OTHER; note = 2'-O-methyl modified nucleotide
  modified_base 39: mod_base = OTHER; note = 2'-O-methyl modified nucleotide
  modified_base 40: mod_base = OTHER; note = 2'-O-methyl modified nucleotide
  modified_base 69: mod_base = OTHER; note = 2'-O-methyl modified nucleotide
  modified_base 70: mod_base = OTHER; note = 2'-O-methyl modified nucleotide
  modified_base 71: mod_base = OTHER; note = 2'-O-methyl modified nucleotide
  modified_base 72: mod_base = OTHER; note = 2'-O-methyl modified nucleotide
  modified_base 73: mod_base = OTHER; note = 2'-O-methyl modified nucleotide
  modified_base 74: mod_base = OTHER; note = 2'-O-methyl modified nucleotide
  modified_base 75: mod_base = OTHER; note = 2'-O-methyl modified nucleotide
  modified_base 76: mod_base = OTHER; note = 2'-O-methyl modified nucleotide
  modified_base 77: mod_base = OTHER; note = 2'-O-methyl modified nucleotide
  modified_base 78: mod_base = OTHER; note = 2'-O-methyl modified nucleotide
  modified_base 79: mod_base = OTHER; note = 2'-O-methyl modified nucleotide
  modified_base 80: mod_base = OTHER; note = 2'-O-methyl modified nucleotide
  modified_base 81: mod_base = OTHER; note = 2'-O-methyl modified nucleotide
  modified_base 82: mod_base = OTHER; note = 2'-O-methyl modified nucleotide
  modified_base 83: mod_base = OTHER; note = 2'-O-methyl modified nucleotide
  modified_base 84: mod_base = OTHER; note = 2'-O-methyl modified nucleotide
  modified_base 85: mod_base = OTHER; note = 2'-O-methyl modified nucleotide
  modified_base 86: mod_base = OTHER; note = 2'-O-methyl modified nucleotide
  modified_base 87: mod_base = OTHER; note = 2'-O-methyl modified nucleotide
  modified_base 88: mod_base = OTHER; note = 2'-O-methyl modified nucleotide
  modified_base 89: mod_base = OTHER; note = 2'-O-methyl modified nucleotide
  modified_base 90: mod_base = OTHER; note = 2'-O-methyl modified nucleotide
  modified_base 91: mod_base = OTHER; note = 2'-O-methyl modified nucleotide
  modified_base 92: mod_base = OTHER; note = 2'-O-methyl modified nucleotide
  modified_base 93: mod_base = OTHER; note = 2'-O-methyl modified nucleotide
  modified_base 94: mod_base = OTHER; note = 2'-O-methyl modified nucleotide
  modified_base 95: mod_base = OTHER; note = 2'-O-methyl modified nucleotide
  modified_base 96: mod_base = OTHER; note = 2'-O-methyl modified nucleotide
  modified_base 124: mod_base = OTHER; note = Nucleotide with phosphorothioate linkage
  modified_base 125: mod_base = OTHER; note = 2'-O-methyl modified nucleotide with phosphorothioate linkage
  modified_base 126: mod_base = OTHER; note = 2'-O-methyl modified nucleotide with phosphorothioate linkage
  modified_base 127: mod_base = OTHER; note = 2'-O-methyl modified nucleotide
gagaatcaaaatcggtgaatgttttagagctagaaatagcaagttaaaataaggctagtccgttatcaacttgaaaaagtggcaccgagtcggtgctgtctgccttagttgaattcaccgattttga

SEQ ID NO: 16225 - RNA, 126 nt, synthetic construct
  source 1..126: mol_type = other RNA
  modified_base 1: mod_base = OTHER; note = 2'-O-methyl modified nucleotide with phosphorothioate linkage
  modified_base 2: mod_base = OTHER; note = 2'-O-methyl modified nucleotide with phosphorothioate linkage
  modified_base 3: mod_base = OTHER; note = 2'-O-methyl modified nucleotide with phosphorothioate linkage
  modified_base 29: mod_base = OTHER; note = 2'-O-methyl modified nucleotide
  modified_base 30: mod_base = OTHER; note = 2'-O-methyl modified nucleotide
  modified_base 31: mod_base = OTHER; note = 2'-O-methyl modified nucleotide
  modified_base 32: mod_base = OTHER; note = 2'-O-methyl modified nucleotide
  modified_base 33: mod_base = OTHER; note = 2'-O-methyl modified nucleotide
  modified_base 34: mod_base = OTHER; note = 2'-O-methyl modified nucleotide
  modified_base 35: mod_base = OTHER; note = 2'-O-methyl modified nucleotide
  modified_base 36: mod_base = OTHER; note = 2'-O-methyl modified nucleotide
  modified_base 37: mod_base = OTHER; note = 2'-O-methyl modified nucleotide
  modified_base 38: mod_base = OTHER; note = 2'-O-methyl modified nucleotide
  modified_base 39: mod_base = OTHER; note = 2'-O-methyl modified nucleotide
  modified_base 40: mod_base = OTHER; note = 2'-O-methyl modified nucleotide
  modified_base 69: mod_base = OTHER; note = 2'-O-methyl modified nucleotide
  modified_base 70: mod_base = OTHER; note = 2'-O-methyl modified nucleotide
  modified_base 71: mod_base = OTHER; note = 2'-O-methyl modified nucleotide
  modified_base 72: mod_base = OTHER; note = 2'-O-methyl modified nucleotide
  modified_base 73: mod_base = OTHER; note = 2'-O-methyl modified nucleotide
  modified_base 74: mod_base = OTHER; note = 2'-O-methyl modified nucleotide
  modified_base 75: mod_base = OTHER; note = 2'-O-methyl modified nucleotide
  modified_base 76: mod_base = OTHER; note = 2'-O-methyl modified nucleotide
  modified_base 77: mod_base = OTHER; note = 2'-O-methyl modified nucleotide
  modified_base 78: mod_base = OTHER; note = 2'-O-methyl modified nucleotide
  modified_base 79: mod_base = OTHER; note = 2'-O-methyl modified nucleotide
  modified_base 80: mod_base = OTHER; note = 2'-O-methyl modified nucleotide
  modified_base 81: mod_base = OTHER; note = 2'-O-methyl modified nucleotide
  modified_base 82: mod_base = OTHER; note = 2'-O-methyl modified nucleotide
  modified_base 83: mod_base = OTHER; note = 2'-O-methyl modified nucleotide
  modified_base 84: mod_base = OTHER; note = 2'-O-methyl modified nucleotide
  modified_base 85: mod_base = OTHER; note = 2'-O-methyl modified nucleotide
  modified_base 86: mod_base = OTHER; note = 2'-O-methyl modified nucleotide
  modified_base 87: mod_base = OTHER; note = 2'-O-methyl modified nucleotide
  modified_base 88: mod_base = OTHER; note = 2'-O-methyl modified nucleotide
  modified_base 89: mod_base = OTHER; note = 2'-O-methyl modified nucleotide
  modified_base 90: mod_base = OTHER; note = 2'-O-methyl modified nucleotide
  modified_base 91: mod_base = OTHER; note = 2'-O-methyl modified nucleotide
  modified_base 92: mod_base = OTHER; note = 2'-O-methyl modified nucleotide
  modified_base 93: mod_base = OTHER; note = 2'-O-methyl modified nucleotide
  modified_base 94: mod_base = OTHER; note = 2'-O-methyl modified nucleotide
  modified_base 95: mod_base = OTHER; note = 2'-O-methyl modified nucleotide
  modified_base 96: mod_base = OTHER; note = 2'-O-methyl modified nucleotide
  modified_base 123: mod_base = OTHER; note = Nucleotide with phosphorothioate linkage
  modified_base 124: mod_base = OTHER; note = 2'-O-methyl modified nucleotide with phosphorothioate linkage
  modified_base 125: mod_base = OTHER; note = 2'-O-methyl modified nucleotide with phosphorothioate linkage
  modified_base 126: mod_base = OTHER; note = 2'-O-methyl modified nucleotide
gagaatcaaaatcggtgaatgttttagagctagaaatagcaagttaaaataaggctagtccgttatcaacttgaaaaagtggcaccgagtcggtgctgtctgccttagttgaattcaccgattttg

SEQ ID NO: 16226 - RNA, 125 nt, synthetic construct
  source 1..125: mol_type = other RNA
  modified_base 1: mod_base = OTHER; note = 2'-O-methyl modified nucleotide with phosphorothioate linkage
  modified_base 2: mod_base = OTHER; note = 2'-O-methyl modified nucleotide with phosphorothioate linkage
  modified_base 3: mod_base = OTHER; note = 2'-O-methyl modified nucleotide with phosphorothioate linkage
  modified_base 29: mod_base = OTHER; note = 2'-O-methyl modified nucleotide
  modified_base 30: mod_base = OTHER; note = 2'-O-methyl modified nucleotide
  modified_base 31: mod_base = OTHER; note = 2'-O-methyl modified nucleotide
  modified_base 32: mod_base = OTHER; note = 2'-O-methyl modified nucleotide
  modified_base 33: mod_base = OTHER; note = 2'-O-methyl modified nucleotide
  modified_base 34: mod_base = OTHER; note = 2'-O-methyl modified nucleotide
  modified_base 35: mod_base = OTHER; note = 2'-O-methyl modified nucleotide
  modified_base 36: mod_base = OTHER; note = 2'-O-methyl modified nucleotide
  modified_base 37: mod_base = OTHER; note = 2'-O-methyl modified nucleotide
  modified_base 38: mod_base = OTHER; note = 2'-O-methyl modified nucleotide
  modified_base 39: mod_base = OTHER; note = 2'-O-methyl modified nucleotide
  modified_base 40: mod_base = OTHER; note = 2'-O-methyl modified nucleotide
  modified_base 69: mod_base = OTHER; note = 2'-O-methyl modified nucleotide
  modified_base 70: mod_base = OTHER; note = 2'-O-methyl modified nucleotide
  modified_base 71: mod_base = OTHER; note = 2'-O-methyl modified nucleotide
  modified_base 72: mod_base = OTHER; note = 2'-O-methyl modified nucleotide
  modified_base 73: mod_base = OTHER; note = 2'-O-methyl modified nucleotide
  modified_base 74: mod_base = OTHER; note = 2'-O-methyl modified nucleotide
  modified_base 75: mod_base = OTHER; note = 2'-O-methyl modified nucleotide
  modified_base 76: mod_base = OTHER; note = 2'-O-methyl modified nucleotide
  modified_base 77: mod_base = OTHER; note = 2'-O-methyl modified nucleotide
  modified_base 78: mod_base = OTHER; note = 2'-O-methyl modified nucleotide
  modified_base 79: mod_base = OTHER; note = 2'-O-methyl modified nucleotide
  modified_base 80: mod_base = OTHER; note = 2'-O-methyl modified nucleotide
  modified_base 81: mod_base = OTHER; note = 2'-O-methyl modified nucleotide
  modified_base 82: mod_base = OTHER; note = 2'-O-methyl modified nucleotide
  modified_base 83: mod_base = OTHER; note = 2'-O-methyl modified nucleotide
  modified_base 84: mod_base = OTHER; note = 2'-O-methyl modified nucleotide
  modified_base 85: mod_base = OTHER; note = 2'-O-methyl modified nucleotide
  modified_base 86: mod_base = OTHER; note = 2'-O-methyl modified nucleotide
  modified_base 87: mod_base = OTHER; note = 2'-O-methyl modified nucleotide
  modified_base 88: mod_base = OTHER; note = 2'-O-methyl modified nucleotide
  modified_base 89: mod_base = OTHER; note = 2'-O-methyl modified nucleotide
  modified_base 90: mod_base = OTHER; note = 2'-O-methyl modified nucleotide
  modified_base 91: mod_base = OTHER; note = 2'-O-methyl modified nucleotide
  modified_base 92: mod_base = OTHER; note = 2'-O-methyl modified nucleotide
  modified_base 93: mod_base = OTHER; note = 2'-O-methyl modified nucleotide
  modified_base 94: mod_base = OTHER; note = 2'-O-methyl modified nucleotide
  modified_base 95: mod_base = OTHER; note = 2'-O-methyl modified nucleotide
  modified_base 96: mod_base = OTHER; note = 2'-O-methyl modified nucleotide
  modified_base 122: mod_base = OTHER; note = Nucleotide with phosphorothioate linkage
  modified_base 123: mod_base = OTHER; note = 2'-O-methyl modified nucleotide with phosphorothioate linkage
  modified_base 124: mod_base = OTHER; note = 2'-O-methyl modified nucleotide with phosphorothioate linkage
  modified_base 125: mod_base = OTHER; note = 2'-O-methyl modified nucleotide
gagaatcaaaatcggtgaatgttttagagctagaaatagcaagttaaaataaggctagtccgttatcaacttgaaaaagtggcaccgagtcggtgctgtctgccttagttgaattcaccgatttt

SEQ ID NO: 16227 - RNA, 124 nt, synthetic construct
  source 1..124: mol_type = other RNA
  modified_base 1: mod_base = OTHER; note = 2'-O-methyl modified nucleotide with phosphorothioate linkage
  modified_base 2: mod_base = OTHER; note = 2'-O-methyl modified nucleotide with phosphorothioate linkage
  modified_base 3: mod_base = OTHER; note = 2'-O-methyl modified nucleotide with phosphorothioate linkage
  modified_base 29: mod_base = OTHER; note = 2'-O-methyl modified nucleotide
  modified_base 30: mod_base = OTHER; note = 2'-O-methyl modified nucleotide
  modified_base 31: mod_base = OTHER; note = 2'-O-methyl modified nucleotide
  modified_base 32: mod_base = OTHER; note = 2'-O-methyl modified nucleotide
  modified_base 33: mod_base = OTHER; note = 2'-O-methyl modified nucleotide
  modified_base 34: mod_base = OTHER; note = 2'-O-methyl modified nucleotide
  modified_base 35: mod_base = OTHER; note = 2'-O-methyl modified nucleotide
  modified_base 36: mod_base = OTHER; note = 2'-O-methyl modified nucleotide
  modified_base 37: mod_base = OTHER; note = 2'-O-methyl modified nucleotide
  modified_base 38: mod_base = OTHER; note = 2'-O-methyl modified nucleotide
  modified_base 39: mod_base = OTHER; note = 2'-O-methyl modified nucleotide
  modified_base 40: mod_base = OTHER; note = 2'-O-methyl modified nucleotide
  modified_base 69: mod_base = OTHER; note = 2'-O-methyl modified nucleotide
  modified_base 70: mod_base = OTHER; note = 2'-O-methyl modified nucleotide
  modified_base 71: mod_base = OTHER; note = 2'-O-methyl modified nucleotide
  modified_base 72: mod_base = OTHER; note = 2'-O-methyl modified nucleotide
  modified_base 73: mod_base = OTHER; note = 2'-O-methyl modified nucleotide
  modified_base 74: mod_base = OTHER; note = 2'-O-methyl modified nucleotide
  modified_base 75: mod_base = OTHER; note = 2'-O-methyl modified nucleotide
  modified_base 76: mod_base = OTHER; note = 2'-O-methyl modified nucleotide
  modified_base 77: mod_base = OTHER; note = 2'-O-methyl modified nucleotide
  modified_base 78: mod_base = OTHER; note = 2'-O-methyl modified nucleotide
  modified_base 79: mod_base = OTHER; note = 2'-O-methyl modified nucleotide
  modified_base 80: mod_base = OTHER; note = 2'-O-methyl modified nucleotide
  modified_base 81: mod_base = OTHER; note = 2'-O-methyl modified nucleotide
  modified_base 82: mod_base = OTHER; note = 2'-O-methyl modified nucleotide
  modified_base 83: mod_base = OTHER; note = 2'-O-methyl modified nucleotide
  modified_base 84: mod_base = OTHER; note = 2'-O-methyl modified nucleotide
  modified_base 85: mod_base = OTHER; note = 2'-O-methyl modified nucleotide
  modified_base 86: mod_base = OTHER; note = 2'-O-methyl modified nucleotide
  modified_base 87: mod_base = OTHER; note = 2'-O-methyl modified nucleotide
  modified_base 88: mod_base = OTHER; note = 2'-O-methyl modified nucleotide
  modified_base 89: mod_base = OTHER; note = 2'-O-methyl modified nucleotide
  modified_base 90: mod_base = OTHER; note = 2'-O-methyl modified nucleotide
  modified_base 91: mod_base = OTHER; note = 2'-O-methyl modified nucleotide
  modified_base 92: mod_base = OTHER; note = 2'-O-methyl modified nucleotide
  modified_base 93: mod_base = OTHER; note = 2'-O-methyl modified nucleotide
  modified_base 94: mod_base = OTHER; note = 2'-O-methyl modified nucleotide
  modified_base 95: mod_base = OTHER; note = 2'-O-methyl modified nucleotide
  modified_base 96: mod_base = OTHER; note = 2'-O-methyl modified nucleotide
  modified_base 121: mod_base = OTHER; note = Nucleotide with phosphorothioate linkage
  modified_base 122: mod_base = OTHER; note = 2'-O-methyl modified nucleotide with phosphorothioate linkage
  modified_base 123: mod_base = OTHER; note = 2'-O-methyl modified nucleotide with phosphorothioate linkage
  modified_base 124: mod_base = OTHER; note = 2'-O-methyl modified nucleotide
gagaatcaaaatcggtgaatgttttagagctagaaatagcaagttaaaataaggctagtccgttatcaacttgaaaaagtggcaccgagtcggtgctgtctgccttagttgaattcaccgattt

SEQ ID NO: 16228 - RNA, 123 nt, synthetic construct
  source 1..123: mol_type = other RNA
  modified_base 1: mod_base = OTHER; note = 2'-O-methyl modified nucleotide with phosphorothioate linkage
  modified_base 2: mod_base = OTHER; note = 2'-O-methyl modified nucleotide with phosphorothioate linkage
  modified_base 3: mod_base = OTHER; note = 2'-O-methyl modified nucleotide with phosphorothioate linkage
  modified_base 29: mod_base = OTHER; note = 2'-O-methyl modified nucleotide
  modified_base 30: mod_base = OTHER; note = 2'-O-methyl modified nucleotide
  modified_base 31: mod_base = OTHER; note = 2'-O-methyl modified nucleotide
  modified_base 32: mod_base = OTHER; note = 2'-O-methyl modified nucleotide
  modified_base 33: mod_base = OTHER; note = 2'-O-methyl modified nucleotide
  modified_base 34: mod_base = OTHER; note = 2'-O-methyl modified nucleotide
  modified_base 35: mod_base = OTHER; note = 2'-O-methyl modified nucleotide
  modified_base 36: mod_base = OTHER; note = 2'-O-methyl modified nucleotide
  modified_base 37: mod_base = OTHER; note = 2'-O-methyl modified nucleotide
  modified_base 38: mod_base = OTHER; note = 2'-O-methyl modified nucleotide
  modified_base 39: mod_base = OTHER; note = 2'-O-methyl modified nucleotide
  modified_base 40: mod_base = OTHER; note = 2'-O-methyl modified nucleotide
  modified_base 69: mod_base = OTHER; note = 2'-O-methyl modified nucleotide
  modified_base 70: mod_base = OTHER; note = 2'-O-methyl modified nucleotide
  modified_base 71: mod_base = OTHER; note = 2'-O-methyl modified nucleotide
  modified_base 72: mod_base = OTHER; note = 2'-O-methyl modified nucleotide
  modified_base 73: mod_base = OTHER; note = 2'-O-methyl modified nucleotide
  modified_base 74: mod_base = OTHER; note = 2'-O-methyl modified nucleotide
  modified_base 75: mod_base = OTHER; note = 2'-O-methyl modified nucleotide
  modified_base 76: mod_base = OTHER; note = 2'-O-methyl modified nucleotide
  modified_base 77: mod_base = OTHER; note = 2'-O-methyl modified nucleotide
  modified_base 78: mod_base = OTHER; note = 2'-O-methyl modified nucleotide
  modified_base 79: mod_base = OTHER; note = 2'-O-methyl modified nucleotide
  modified_base 80: mod_base = OTHER; note = 2'-O-methyl modified nucleotide
  modified_base 81: mod_base = OTHER; note = 2'-O-methyl modified nucleotide
  modified_base 82: mod_base = OTHER; note = 2'-O-methyl modified nucleotide
  modified_base 83: mod_base = OTHER; note = 2'-O-methyl modified nucleotide
  modified_base 84: mod_base = OTHER; note = 2'-O-methyl modified nucleotide
  modified_base 85: mod_base = OTHER; note = 2'-O-methyl modified nucleotide
  modified_base 86: mod_base = OTHER; note = 2'-O-methyl modified nucleotide
  modified_base 87: mod_base = OTHER; note = 2'-O-methyl modified nucleotide
  modified_base 88: mod_base = OTHER; note = 2'-O-methyl modified nucleotide
  modified_base 89: mod_base = OTHER; note = 2'-O-methyl modified nucleotide
  modified_base 90: mod_base = OTHER; note = 2'-O-methyl modified nucleotide
  modified_base 91: mod_base = OTHER; note = 2'-O-methyl modified nucleotide
  modified_base 92: mod_base = OTHER; note = 2'-O-methyl modified nucleotide
  modified_base 93: mod_base = OTHER; note = 2'-O-methyl modified nucleotide
  modified_base 94: mod_base = OTHER; note = 2'-O-methyl modified nucleotide
  modified_base 95: mod_base = OTHER; note = 2'-O-methyl modified nucleotide
  modified_base 96: mod_base = OTHER; note = 2'-O-methyl modified nucleotide
  modified_base 120: mod_base = OTHER; note = Nucleotide with phosphorothioate linkage
  modified_base 121: mod_base = OTHER; note = 2'-O-methyl modified nucleotide with phosphorothioate linkage
  modified_base 122: mod_base = OTHER; note = 2'-O-methyl modified nucleotide with phosphorothioate linkage
  modified_base 123: mod_base = OTHER; note = 2'-O-methyl modified nucleotide
gagaatcaaaatcggtgaatgttttagagctagaaatagcaagttaaaataaggctagtccgttatcaacttgaaaaagtggcaccgagtcggtgctgtctgccttagttgaattcaccgatt

SEQ ID NO: 16229 - RNA, 130 nt, synthetic construct
  source 1..130: mol_type = other RNA
  modified_base 1: mod_base = OTHER; note = 2'-O-methyl modified nucleotide with phosphorothioate linkage
  modified_base 2: mod_base = OTHER; note = 2'-O-methyl modified nucleotide with phosphorothioate linkage
  modified_base 3: mod_base = OTHER; note = 2'-O-methyl modified nucleotide with phosphorothioate linkage
  modified_base 29: mod_base = OTHER; note = 2'-O-methyl modified nucleotide
  modified_base 30: mod_base = OTHER; note = 2'-O-methyl modified nucleotide
  modified_base 31: mod_base = OTHER; note = 2'-O-methyl modified nucleotide
  modified_base 32: mod_base = OTHER; note = 2'-O-methyl modified nucleotide
  modified_base 33: mod_base = OTHER; note = 2'-O-methyl modified nucleotide
  modified_base 34: mod_base = OTHER; note = 2'-O-methyl modified nucleotide
  modified_base 35: mod_base = OTHER; note = 2'-O-methyl modified nucleotide
  modified_base 36: mod_base = OTHER; note = 2'-O-methyl modified nucleotide
  modified_base 37: mod_base = OTHER; note = 2'-O-methyl modified nucleotide
  modified_base 38: mod_base = OTHER; note = 2'-O-methyl modified nucleotide
  modified_base 39: mod_base = OTHER; note = 2'-O-methyl modified nucleotide
  modified_base 40: mod_base = OTHER; note = 2'-O-methyl modified nucleotide
  modified_base 69: mod_base = OTHER; note = 2'-O-methyl modified nucleotide
  modified_base 70: mod_base = OTHER; note = 2'-O-methyl modified nucleotide
  modified_base 71: mod_base = OTHER; note = 2'-O-methyl modified nucleotide
  modified_base 72: mod_base = OTHER; note = 2'-O-methyl modified nucleotide
  modified_base 73: mod_base = OTHER; note = 2'-O-methyl modified nucleotide
  modified_base 74: mod_base = OTHER; note = 2'-O-methyl modified nucleotide
  modified_base 75: mod_base = OTHER; note = 2'-O-methyl modified nucleotide
  modified_base 76: mod_base = OTHER; note = 2'-O-methyl modified nucleotide
  modified_base 77: mod_base = OTHER; note = 2'-O-methyl modified nucleotide
  modified_base 78: mod_base = OTHER; note = 2'-O-methyl modified nucleotide
  modified_base 79: mod_base = OTHER; note = 2'-O-methyl modified nucleotide
  modified_base 80: mod_base = OTHER; note = 2'-O-methyl modified nucleotide
  modified_base 81: mod_base = OTHER; note = 2'-O-methyl modified nucleotide
  modified_base 82: mod_base = OTHER; note = 2'-O-methyl modified nucleotide
  modified_base 83: mod_base = OTHER; note = 2'-O-methyl modified nucleotide
  modified_base 84: mod_base = OTHER; note = 2'-O-methyl modified nucleotide
  modified_base 85: mod_base = OTHER; note = 2'-O-methyl modified nucleotide
  modified_base 86: mod_base = OTHER; note = 2'-O-methyl modified nucleotide
  modified_base 87: mod_base = OTHER; note = 2'-O-methyl modified nucleotide
  modified_base 88: mod_base = OTHER; note = 2'-O-methyl modified nucleotide
  modified_base 89: mod_base = OTHER; note = 2'-O-methyl modified nucleotide
  modified_base 90: mod_base = OTHER; note = 2'-O-methyl modified nucleotide
  modified_base 91: mod_base = OTHER; note = 2'-O-methyl modified nucleotide
  modified_base 92: mod_base = OTHER; note = 2'-O-methyl modified nucleotide
  modified_base 93: mod_base = OTHER; note = 2'-O-methyl modified nucleotide
  modified_base 94: mod_base = OTHER; note = 2'-O-methyl modified nucleotide
  modified_base 95: mod_base = OTHER; note = 2'-O-methyl modified nucleotide
  modified_base 96: mod_base = OTHER; note = 2'-O-methyl modified nucleotide
  modified_base 127: mod_base = OTHER; note = Nucleotide with phosphorothioate linkage
  modified_base 128: mod_base = OTHER; note = 2'-O-methyl modified nucleotide with phosphorothioate linkage
  modified_base 129: mod_base = OTHER; note = 2'-O-methyl modified nucleotide with phosphorothioate linkage
  modified_base 130: mod_base = OTHER; note = 2'-O-methyl modified nucleotide
gagaatcaaaatcggtgaatgttttagagctagaaatagcaagttaaaataaggctagtccgttatcaacttgaaaaagtggcaccgagtcggtgctctgtctgccttagttgaattcaccgattttgat

SEQ ID NO: 16230 - RNA, 129 nt, synthetic construct
  source 1..129: mol_type = other RNA
  modified_base 1: mod_base = OTHER; note = 2'-O-methyl modified nucleotide with phosphorothioate linkage
  modified_base 2: mod_base = OTHER; note = 2'-O-methyl modified nucleotide with phosphorothioate linkage
  modified_base 3: mod_base = OTHER; note = 2'-O-methyl modified nucleotide with phosphorothioate linkage
  modified_base 29: mod_base = OTHER; note = 2'-O-methyl modified nucleotide
  modified_base 30: mod_base = OTHER; note = 2'-O-methyl modified nucleotide
  modified_base 31: mod_base = OTHER; note = 2'-O-methyl modified nucleotide
  modified_base 32: mod_base = OTHER; note = 2'-O-methyl modified nucleotide
  modified_base 33: mod_base = OTHER; note = 2'-O-methyl modified nucleotide
  modified_base 34: mod_base = OTHER; note = 2'-O-methyl modified nucleotide
  modified_base 35: mod_base = OTHER; note = 2'-O-methyl modified nucleotide
  modified_base 36: mod_base = OTHER; note = 2'-O-methyl modified nucleotide
  modified_base 37: mod_base = OTHER; note = 2'-O-methyl modified nucleotide
  modified_base 38: mod_base = OTHER; note = 2'-O-methyl modified nucleotide
  modified_base 39: mod_base = OTHER; note = 2'-O-methyl modified nucleotide
  modified_base 40: mod_base = OTHER; note = 2'-O-methyl modified nucleotide
  modified_base 69: mod_base = OTHER; note = 2'-O-methyl modified nucleotide
  modified_base 70: mod_base = OTHER; note = 2'-O-methyl modified nucleotide
  modified_base 71: mod_base = OTHER; note = 2'-O-methyl modified nucleotide
  modified_base 72: mod_base = OTHER; note = 2'-O-methyl modified nucleotide
  modified_base 73: mod_base = OTHER; note = 2'-O-methyl modified nucleotide
  modified_base 74: mod_base = OTHER; note = 2'-O-methyl modified nucleotide
  modified_base 75: mod_base = OTHER; note = 2'-O-methyl modified nucleotide
  modified_base 76: mod_base = OTHER; note = 2'-O-methyl modified nucleotide
  modified_base 77: mod_base = OTHER; note = 2'-O-methyl modified nucleotide
  modified_base 78: mod_base = OTHER; note = 2'-O-methyl modified nucleotide
  modified_base 79: mod_base = OTHER; note = 2'-O-methyl modified nucleotide
  modified_base 80: mod_base = OTHER; note = 2'-O-methyl modified nucleotide
  modified_base 81: mod_base = OTHER; note = 2'-O-methyl modified nucleotide
  modified_base 82: mod_base = OTHER; note = 2'-O-methyl modified nucleotide
  modified_base 83: mod_base = OTHER; note = 2'-O-methyl modified nucleotide
  modified_base 84: mod_base = OTHER; note = 2'-O-methyl modified nucleotide
  modified_base 85: mod_base = OTHER; note = 2'-O-methyl modified nucleotide
  modified_base 86: mod_base = OTHER; note = 2'-O-methyl modified nucleotide
  modified_base 87: mod_base = OTHER; note = 2'-O-methyl modified nucleotide
  modified_base 88: mod_base = OTHER; note = 2'-O-methyl modified nucleotide
  modified_base 89: mod_base = OTHER; note = 2'-O-methyl modified nucleotide
  modified_base 90: mod_base = OTHER; note = 2'-O-methyl modified nucleotide
  modified_base 91: mod_base = OTHER; note = 2'-O-methyl modified nucleotide
  modified_base 92: mod_base = OTHER; note = 2'-O-methyl modified nucleotide
  modified_base 93: mod_base = OTHER; note = 2'-O-methyl modified nucleotide
  modified_base 94: mod_base = OTHER; note = 2'-O-methyl modified nucleotide
  modified_base 95: mod_base = OTHER; note = 2'-O-methyl modified nucleotide
  modified_base 96: mod_base = OTHER; note = 2'-O-methyl modified nucleotide
  modified_base 126: mod_base = OTHER; note = Nucleotide with phosphorothioate linkage
  modified_base 127: mod_base = OTHER; note = 2'-O-methyl modified nucleotide with phosphorothioate linkage
  modified_base 128: mod_base = OTHER; note = 2'-O-methyl modified nucleotide with phosphorothioate linkage
  modified_base 129: mod_base = OTHER; note = 2'-O-methyl modified nucleotide
gagaatcaaaatcggtgaatgttttagagctagaaatagcaagttaaaataaggctagtccgttatcaacttgaaaaagtggcaccgagtcggtgctctgtctgccttagttgaattcaccgattttga

SEQ ID NO: 16231 - RNA, 128 nt, synthetic construct
  source 1..128: mol_type = other RNA
  modified_base 1: mod_base = OTHER; note = 2'-O-methyl modified nucleotide with phosphorothioate linkage
  modified_base 2: mod_base = OTHER; note = 2'-O-methyl modified nucleotide with phosphorothioate linkage
  modified_base 3: mod_base = OTHER; note = 2'-O-methyl modified nucleotide with phosphorothioate linkage
  modified_base 29: mod_base = OTHER; note = 2'-O-methyl modified nucleotide
  modified_base 30: mod_base = OTHER; note = 2'-O-methyl modified nucleotide
  modified_base 31: mod_base = OTHER; note = 2'-O-methyl modified nucleotide
  modified_base 32: mod_base = OTHER; note = 2'-O-methyl modified nucleotide
  modified_base 33: mod_base = OTHER; note = 2'-O-methyl modified nucleotide
  modified_base 34: mod_base = OTHER; note = 2'-O-methyl modified nucleotide
  modified_base 35: mod_base = OTHER; note = 2'-O-methyl modified nucleotide
  modified_base 36: mod_base = OTHER; note = 2'-O-methyl modified nucleotide
  modified_base 37: mod_base = OTHER; note = 2'-O-methyl modified nucleotide
  modified_base 38: mod_base = OTHER; note = 2'-O-methyl modified nucleotide
  modified_base 39: mod_base = OTHER; note = 2'-O-methyl modified nucleotide
  modified_base 40: mod_base = OTHER; note = 2'-O-methyl modified nucleotide
  modified_base 69: mod_base = OTHER; note = 2'-O-methyl modified nucleotide
  modified_base 70: mod_base = OTHER; note = 2'-O-methyl modified nucleotide
  modified_base 71: mod_base = OTHER; note = 2'-O-methyl modified nucleotide
  modified_base 72: mod_base = OTHER; note = 2'-O-methyl modified nucleotide
  modified_base 73: mod_base = OTHER; note = 2'-O-methyl modified nucleotide
  modified_base 74: mod_base = OTHER; note = 2'-O-methyl modified nucleotide
  modified_base 75: mod_base = OTHER; note = 2'-O-methyl modified nucleotide
  modified_base 76: mod_base = OTHER; note = 2'-O-methyl modified nucleotide
  modified_base 77: mod_base = OTHER; note = 2'-O-methyl modified nucleotide
  modified_base 78: mod_base = OTHER; note = 2'-O-methyl modified nucleotide
  modified_base 79: mod_base = OTHER; note = 2'-O-methyl modified nucleotide
  modified_base 80: mod_base = OTHER; note = 2'-O-methyl modified nucleotide
  modified_base 81: mod_base = OTHER; note = 2'-O-methyl modified nucleotide
  modified_base 82: mod_base = OTHER; note = 2'-O-methyl modified nucleotide
  modified_base 83: mod_base = OTHER; note = 2'-O-methyl modified nucleotide
  modified_base 84: mod_base = OTHER; note = 2'-O-methyl modified nucleotide
  modified_base 85: mod_base = OTHER; note = 2'-O-methyl modified nucleotide
  modified_base 86: mod_base = OTHER; note = 2'-O-methyl modified nucleotide
  modified_base 87: mod_base = OTHER; note = 2'-O-methyl modified nucleotide
  modified_base 88: mod_base = OTHER; note = 2'-O-methyl modified nucleotide
  modified_base 89: mod_base = OTHER; note = 2'-O-methyl modified nucleotide
  modified_base 90: mod_base = OTHER; note = 2'-O-methyl modified nucleotide
  modified_base 91: mod_base = OTHER; note = 2'-O-methyl modified nucleotide
  modified_base 92: mod_base = OTHER; note = 2'-O-methyl modified nucleotide
  modified_base 93: mod_base = OTHER; note = 2'-O-methyl modified nucleotide
  modified_base 94: mod_base = OTHER; note = 2'-O-methyl modified nucleotide
  modified_base 95: mod_base = OTHER; note = 2'-O-methyl modified nucleotide
  modified_base 96: mod_base = OTHER; note = 2'-O-methyl modified nucleotide
  modified_base 125: mod_base = OTHER; note = Nucleotide with phosphorothioate linkage
  modified_base 126: mod_base = OTHER; note = 2'-O-methyl modified nucleotide with phosphorothioate linkage
  modified_base 127: mod_base = OTHER; note = 2'-O-methyl modified nucleotide with phosphorothioate linkage
  modified_base 128: mod_base = OTHER; note = 2'-O-methyl modified nucleotide
gagaatcaaaatcggtgaatgttttagagctagaaatagcaagttaaaataaggctagtccgttatcaacttgaaaaagtggcaccgagtcggtgctctgtctgccttagttgaattcaccgattttg

SEQ ID NO: 16232 - RNA, 127 nt, synthetic construct
  source 1..127: mol_type = other RNA
  modified_base 1: mod_base = OTHER; note = 2'-O-methyl modified nucleotide with phosphorothioate linkage
  modified_base 2: mod_base = OTHER; note = 2'-O-methyl modified nucleotide with phosphorothioate linkage
  modified_base 3: mod_base = OTHER; note = 2'-O-methyl modified nucleotide with phosphorothioate linkage
  modified_base 29: mod_base = OTHER; note = 2'-O-methyl modified nucleotide
  modified_base 30: mod_base = OTHER; note = 2'-O-methyl modified nucleotide
  modified_base 31: mod_base = OTHER; note = 2'-O-methyl modified nucleotide
  modified_base 32: mod_base = OTHER; note = 2'-O-methyl modified nucleotide
  modified_base 33: mod_base = OTHER; note = 2'-O-methyl modified nucleotide
  modified_base 34: mod_base = OTHER; note = 2'-O-methyl modified nucleotide
  modified_base 35: mod_base = OTHER; note = 2'-O-methyl modified nucleotide
  modified_base 36: mod_base = OTHER; note = 2'-O-methyl modified nucleotide
  modified_base 37: mod_base = OTHER; note = 2'-O-methyl modified nucleotide
  modified_base 38: mod_base = OTHER; note = 2'-O-methyl modified nucleotide
  modified_base 39: mod_base = OTHER; note = 2'-O-methyl modified nucleotide
  modified_base 40: mod_base = OTHER; note = 2'-O-methyl modified nucleotide
  modified_base 69: mod_base = OTHER; note = 2'-O-methyl modified nucleotide
  modified_base 70: mod_base = OTHER; note = 2'-O-methyl modified nucleotide
  modified_base 71: mod_base = OTHER; note = 2'-O-methyl modified nucleotide
  modified_base 72: mod_base = OTHER; note = 2'-O-methyl modified nucleotide
  modified_base 73: mod_base = OTHER; note = 2'-O-methyl modified nucleotide
  modified_base 74: mod_base = OTHER; note = 2'-O-methyl modified nucleotide
  modified_base 75: mod_base = OTHER; note = 2'-O-methyl modified nucleotide
  modified_base 76: mod_base = OTHER; note = 2'-O-methyl modified nucleotide
  modified_base 77: mod_base = OTHER; note = 2'-O-methyl modified nucleotide
  modified_base 78: mod_base = OTHER; note = 2'-O-methyl modified nucleotide
  modified_base 79: mod_base = OTHER; note = 2'-O-methyl modified nucleotide
  modified_base 80: mod_base = OTHER; note = 2'-O-methyl modified nucleotide
  modified_base 81: mod_base = OTHER; note = 2'-O-methyl modified nucleotide
  modified_base 82: mod_base = OTHER; note = 2'-O-methyl modified nucleotide
  modified_base 83: mod_base = OTHER; note = 2'-O-methyl modified nucleotide
  modified_base 84: mod_base = OTHER; note = 2'-O-methyl modified nucleotide
  modified_base 85: mod_base = OTHER; note = 2'-O-methyl modified nucleotide
  modified_base 86: mod_base = OTHER; note = 2'-O-methyl modified nucleotide
  modified_base 87: mod_base = OTHER; note = 2'-O-methyl modified nucleotide
  modified_base 88: mod_base = OTHER; note = 2'-O-methyl modified nucleotide
  modified_base 89: mod_base = OTHER; note = 2'-O-methyl modified nucleotide
  modified_base 90: mod_base = OTHER; note = 2'-O-methyl modified nucleotide
  modified_base 91: mod_base = OTHER; note = 2'-O-methyl modified nucleotide
  modified_base 92: mod_base = OTHER; note = 2'-O-methyl modified nucleotide
  modified_base 93: mod_base = OTHER; note = 2'-O-methyl modified nucleotide
  modified_base 94: mod_base = OTHER; note = 2'-O-methyl modified nucleotide
  modified_base 95: mod_base = OTHER; note = 2'-O-methyl modified nucleotide
  modified_base 96: mod_base = OTHER; note = 2'-O-methyl modified nucleotide
  modified_base 124: mod_base = OTHER; note = Nucleotide with phosphorothioate linkage
  modified_base 125: mod_base = OTHER; note = 2'-O-methyl modified nucleotide with phosphorothioate linkage
  modified_base 126: mod_base = OTHER; note = 2'-O-methyl modified nucleotide with phosphorothioate linkage
  modified_base 127: mod_base = OTHER; note = 2'-O-methyl modified nucleotide
gagaatcaaaatcggtgaatgttttagagctagaaatagcaagttaaaataaggctagtccgttatcaacttgaaaaagtggcaccgagtcggtgctctgtctgccttagttgaattcaccgatttt

SEQ ID NO: 16233 - RNA, 126 nt, synthetic construct
  source 1..126: mol_type = other RNA
  modified_base 1: mod_base = OTHER; note = 2'-O-methyl modified nucleotide with phosphorothioate linkage
  modified_base 2: mod_base = OTHER; note = 2'-O-methyl modified nucleotide with phosphorothioate linkage
  modified_base 3: mod_base = OTHER; note = 2'-O-methyl modified nucleotide with phosphorothioate linkage
  modified_base 29: mod_base = OTHER; note = 2'-O-methyl modified nucleotide
  modified_base 30: mod_base = OTHER; note = 2'-O-methyl modified nucleotide
  modified_base 31: mod_base = OTHER; note = 2'-O-methyl modified nucleotide
  modified_base 32: mod_base = OTHER; note = 2'-O-methyl modified nucleotide
  modified_base 33: mod_base = OTHER; note = 2'-O-methyl modified nucleotide
  modified_base 34: mod_base = OTHER; note = 2'-O-methyl modified nucleotide
  modified_base 35: mod_base = OTHER; note = 2'-O-methyl modified nucleotide
  modified_base 36: mod_base = OTHER; note = 2'-O-methyl modified nucleotide
  modified_base 37: mod_base = OTHER; note = 2'-O-methyl modified nucleotide
  modified_base 38: mod_base = OTHER; note = 2'-O-methyl modified nucleotide
  modified_base 39: mod_base = OTHER; note = 2'-O-methyl modified nucleotide
  modified_base 40: mod_base = OTHER; note = 2'-O-methyl modified nucleotide
  modified_base 69: mod_base = OTHER; note = 2'-O-methyl modified nucleotide
  modified_base 70: mod_base = OTHER; note = 2'-O-methyl modified nucleotide
  modified_base 71: mod_base = OTHER; note = 2'-O-methyl modified nucleotide
  modified_base 72: mod_base = OTHER; note = 2'-O-methyl modified nucleotide
  modified_base 73: mod_base = OTHER; note = 2'-O-methyl modified nucleotide
  modified_base 74: mod_base = OTHER; note = 2'-O-methyl modified nucleotide
  modified_base 75: mod_base = OTHER; note = 2'-O-methyl modified nucleotide
  modified_base 76: mod_base = OTHER; note = 2'-O-methyl modified nucleotide
  modified_base 77: mod_base = OTHER; note = 2'-O-methyl modified nucleotide
  modified_base 78: mod_base = OTHER; note = 2'-O-methyl modified nucleotide
  modified_base 79: mod_base = OTHER; note = 2'-O-methyl modified nucleotide
  modified_base 80: mod_base = OTHER; note = 2'-O-methyl modified nucleotide
  modified_base 81: mod_base = OTHER; note = 2'-O-methyl modified nucleotide
  modified_base 82: mod_base = OTHER; note = 2'-O-methyl modified nucleotide
  modified_base 83: mod_base = OTHER; note = 2'-O-methyl modified nucleotide
  modified_base 84: mod_base = OTHER; note = 2'-O-methyl modified nucleotide
  modified_base 85: mod_base = OTHER; note = 2'-O-methyl modified nucleotide
  modified_base 86: mod_base = OTHER; note = 2'-O-methyl modified nucleotide
  modified_base 87: mod_base = OTHER; note = 2'-O-methyl modified nucleotide
  modified_base 88: mod_base = OTHER; note = 2'-O-methyl modified nucleotide
  modified_base 89: mod_base = OTHER; note = 2'-O-methyl modified nucleotide
  modified_base 90: mod_base = OTHER; note = 2'-O-methyl modified nucleotide
  modified_base 91: mod_base = OTHER; note = 2'-O-methyl modified nucleotide
  modified_base 92: mod_base = OTHER; note = 2'-O-methyl modified nucleotide
  modified_base 93: mod_base = OTHER; note = 2'-O-methyl modified nucleotide
  modified_base 94: mod_base = OTHER; note = 2'-O-methyl modified nucleotide
  modified_base 95: mod_base = OTHER; note = 2'-O-methyl modified nucleotide
  modified_base 96: mod_base = OTHER; note = 2'-O-methyl modified nucleotide
  modified_base 123: mod_base = OTHER; note = Nucleotide with phosphorothioate linkage
  modified_base 124: mod_base = OTHER; note = 2'-O-methyl modified nucleotide with phosphorothioate linkage
  modified_base 125: mod_base = OTHER; note = 2'-O-methyl modified nucleotide with phosphorothioate linkage
  modified_base 126: mod_base = OTHER; note = 2'-O-methyl modified nucleotide
gagaatcaaaatcggtgaatgttttagagctagaaatagcaagttaaaataaggctagtccgttatcaacttgaaaaagtggcaccgagtcggtgctctgtctgccttagttgaattcaccgattt

SEQ ID NO: 16234 - RNA, 125 nt, synthetic construct
  source 1..125: mol_type = other RNA
  modified_base 1: mod_base = OTHER; note = 2'-O-methyl modified nucleotide with phosphorothioate linkage
  modified_base 2: mod_base = OTHER; note = 2'-O-methyl modified nucleotide with phosphorothioate linkage
  modified_base 3: mod_base = OTHER; note = 2'-O-methyl modified nucleotide with phosphorothioate linkage
  modified_base 29: mod_base = OTHER; note = 2'-O-methyl modified nucleotide
  modified_base 30: mod_base = OTHER; note = 2'-O-methyl modified nucleotide
  modified_base 31: mod_base = OTHER; note = 2'-O-methyl modified nucleotide
  modified_base 32: mod_base = OTHER; note = 2'-O-methyl modified nucleotide
  modified_base 33: mod_base = OTHER; note = 2'-O-methyl modified nucleotide
  modified_base 34: mod_base = OTHER; note = 2'-O-methyl modified nucleotide
  modified_base 35: mod_base = OTHER; note = 2'-O-methyl modified nucleotide
  modified_base 36: mod_base = OTHER; note = 2'-O-methyl modified nucleotide
  modified_base 37: mod_base = OTHER; note = 2'-O-methyl modified nucleotide
  modified_base 38: mod_base = OTHER; note = 2'-O-methyl modified nucleotide
  modified_base 39: mod_base = OTHER; note = 2'-O-methyl modified nucleotide
  modified_base 40: mod_base = OTHER; note = 2'-O-methyl modified nucleotide
  modified_base 69: mod_base = OTHER; note = 2'-O-methyl modified nucleotide
  modified_base 70: mod_base = OTHER; note = 2'-O-methyl modified nucleotide
  modified_base 71: mod_base = OTHER; note = 2'-O-methyl modified nucleotide
  modified_base 72: mod_base = OTHER; note = 2'-O-methyl modified nucleotide
  modified_base 73: mod_base = OTHER; note = 2'-O-methyl modified nucleotide
  modified_base 74: mod_base = OTHER; note = 2'-O-methyl modified nucleotide
  modified_base 75: mod_base = OTHER; note = 2'-O-methyl modified nucleotide
  modified_base 76: mod_base = OTHER; note = 2'-O-methyl modified nucleotide
  modified_base 77: mod_base = OTHER; note = 2'-O-methyl modified nucleotide
  modified_base 78: mod_base = OTHER; note = 2'-O-methyl modified nucleotide
  modified_base 79: mod_base = OTHER; note = 2'-O-methyl modified nucleotide
  modified_base 80: mod_base = OTHER; note = 2'-O-methyl modified nucleotide
  modified_base 81: mod_base = OTHER; note = 2'-O-methyl modified nucleotide
  modified_base 82: mod_base = OTHER; note = 2'-O-methyl modified nucleotide
  modified_base 83: mod_base = OTHER; note = 2'-O-methyl modified nucleotide
  modified_base 84: mod_base = OTHER; note = 2'-O-methyl modified nucleotide
  modified_base 85: mod_base = OTHER; note = 2'-O-methyl modified nucleotide
  modified_base 86: mod_base = OTHER; note = 2'-O-methyl modified nucleotide
  modified_base 87: mod_base = OTHER; note = 2'-O-methyl modified nucleotide
  modified_base 88: mod_base = OTHER; note = 2'-O-methyl modified nucleotide
  modified_base 89: mod_base = OTHER; note = 2'-O-methyl modified nucleotide
  modified_base 90: mod_base = OTHER; note = 2'-O-methyl modified nucleotide
  modified_base 91: mod_base = OTHER; note = 2'-O-methyl modified nucleotide
  modified_base 92: mod_base = OTHER; note = 2'-O-methyl modified nucleotide
  modified_base 93: mod_base = OTHER; note = 2'-O-methyl modified nucleotide
  modified_base 94: mod_base = OTHER; note = 2'-O-methyl modified nucleotide
  modified_base 95: mod_base = OTHER; note = 2'-O-methyl modified nucleotide
  modified_base 96: mod_base = OTHER; note = 2'-O-methyl modified nucleotide
  modified_base 122: mod_base = OTHER; note = Nucleotide with phosphorothioate linkage
  modified_base 123: mod_base = OTHER; note = 2'-O-methyl modified nucleotide with phosphorothioate linkage
  modified_base 124: mod_base = OTHER; note = 2'-O-methyl modified nucleotide with phosphorothioate linkage
  modified_base 125: mod_base = OTHER; note = 2'-O-methyl modified nucleotide
gagaatcaaaatcggtgaatgttttagagctagaaatagcaagttaaaataaggctagtccgttatcaacttgaaaaagtggcaccgagtcggtgctctgtctgccttagttgaattcaccgatt

SEQ ID NO: 16235 - RNA, 132 nt, synthetic construct
  source 1..132: mol_type = other RNA
  modified_base 1: mod_base = OTHER; note = 2'-O-methyl modified nucleotide with phosphorothioate linkage
  modified_base 2: mod_base = OTHER; note = 2'-O-methyl modified nucleotide with phosphorothioate linkage
  modified_base 3: mod_base = OTHER; note = 2'-O-methyl modified nucleotide with phosphorothioate linkage
  modified_base 29: mod_base = OTHER; note = 2'-O-methyl modified nucleotide
  modified_base 30: mod_base = OTHER; note = 2'-O-methyl modified nucleotide
  modified_base 31: mod_base = OTHER; note = 2'-O-methyl modified nucleotide
  modified_base 32: mod_base = OTHER; note = 2'-O-methyl modified nucleotide
  modified_base 33: mod_base = OTHER; note = 2'-O-methyl modified nucleotide
  modified_base 34: mod_base = OTHER; note = 2'-O-methyl modified nucleotide
  modified_base 35: mod_base = OTHER; note = 2'-O-methyl modified nucleotide
  modified_base 36: mod_base = OTHER; note = 2'-O-methyl modified nucleotide
  modified_base 37: mod_base = OTHER; note = 2'-O-methyl modified nucleotide
  modified_base 38: mod_base = OTHER; note = 2'-O-methyl modified nucleotide
  modified_base 39: mod_base = OTHER; note = 2'-O-methyl modified nucleotide
  modified_base 40: mod_base = OTHER; note = 2'-O-methyl modified nucleotide
  modified_base 69: mod_base = OTHER; note = 2'-O-methyl modified nucleotide
  modified_base 70: mod_base = OTHER; note = 2'-O-methyl modified nucleotide
  modified_base 71: mod_base = OTHER; note = 2'-O-methyl modified nucleotide
  modified_base 72: mod_base = OTHER; note = 2'-O-methyl modified nucleotide
  modified_base 73: mod_base = OTHER; note = 2'-O-methyl modified nucleotide
  modified_base 74: mod_base = OTHER; note = 2'-O-methyl modified nucleotide
  modified_base 75: mod_base = OTHER; note = 2'-O-methyl modified nucleotide
  modified_base 76: mod_base = OTHER; note = 2'-O-methyl modified nucleotide
  modified_base 77: mod_base = OTHER; note = 2'-O-methyl modified nucleotide
  modified_base 78: mod_base = OTHER; note = 2'-O-methyl modified nucleotide
  modified_base 79: mod_base = OTHER; note = 2'-O-methyl modified nucleotide
  modified_base 80: mod_base = OTHER; note = 2'-O-methyl modified nucleotide
  modified_base 81: mod_base = OTHER; note = 2'-O-methyl modified nucleotide
  modified_base 82: mod_base = OTHER; note = 2'-O-methyl modified nucleotide
  modified_base 83: mod_base = OTHER; note = 2'-O-methyl modified nucleotide
  modified_base 84: mod_base = OTHER; note = 2'-O-methyl modified nucleotide
  modified_base 85: mod_base = OTHER; note = 2'-O-methyl modified nucleotide
  modified_base 86: mod_base = OTHER; note = 2'-O-methyl modified nucleotide
  modified_base 87: mod_base = OTHER; note = 2'-O-methyl modified nucleotide
  modified_base 88: mod_base = OTHER; note = 2'-O-methyl modified nucleotide
  modified_base 89: mod_base = OTHER; note = 2'-O-methyl modified nucleotide
  modified_base 90: mod_base = OTHER; note = 2'-O-methyl modified nucleotide
  modified_base 91: mod_base = OTHER; note = 2'-O-methyl modified nucleotide
  modified_base 92: mod_base = OTHER; note = 2'-O-methyl modified nucleotide
  modified_base 93: mod_base = OTHER; note = 2'-O-methyl modified nucleotide
  modified_base 94: mod_base = OTHER; note = 2'-O-methyl modified nucleotide
  modified_base 95: mod_base = OTHER; note = 2'-O-methyl modified nucleotide
  modified_base 96: mod_base = OTHER; note = 2'-O-methyl modified nucleotide
  modified_base 129: mod_base = OTHER; note = Nucleotide with phosphorothioate linkage
  modified_base 130: mod_base = OTHER; note = 2'-O-methyl modified nucleotide with phosphorothioate linkage
  modified_base 131: mod_base = OTHER; note = 2'-O-methyl modified nucleotide with phosphorothioate linkage
  modified_base 132: mod_base = OTHER; note = 2'-O-methyl modified nucleotide
gagaatcaaaatcggtgaatgttttagagctagaaatagcaagttaaaataaggctagtccgttatcaacttgaaaaagtggcaccgagtcggtgcagtctgtctgccttagttgaattcaccgattttgat

SEQ ID NO: 16236 - RNA, 131 nt, synthetic construct
  source 1..131: mol_type = other RNA
  modified_base 1: mod_base = OTHER; note = 2'-O-methyl modified nucleotide with phosphorothioate linkage
  modified_base 2: mod_base = OTHER; note = 2'-O-methyl modified nucleotide with phosphorothioate linkage
  modified_base 3: mod_base = OTHER; note = 2'-O-methyl modified nucleotide with phosphorothioate linkage
  modified_base 29: mod_base = OTHER; note = 2'-O-methyl modified nucleotide
  modified_base 30: mod_base = OTHER; note = 2'-O-methyl modified nucleotide
  modified_base 31: mod_base = OTHER; note = 2'-O-methyl modified nucleotide
  modified_base 32: mod_base = OTHER; note = 2'-O-methyl modified nucleotide
  modified_base 33: mod_base = OTHER; note = 2'-O-methyl modified nucleotide
  modified_base 34: mod_base = OTHER; note = 2'-O-methyl modified nucleotide
  modified_base 35: mod_base = OTHER; note = 2'-O-methyl modified nucleotide
  modified_base 36: mod_base = OTHER; note = 2'-O-methyl modified nucleotide
  modified_base 37: mod_base = OTHER; note = 2'-O-methyl modified nucleotide
  modified_base 38: mod_base = OTHER; note = 2'-O-methyl modified nucleotide
  modified_base 39: mod_base = OTHER; note = 2'-O-methyl modified nucleotide
  modified_base 40: mod_base = OTHER; note = 2'-O-methyl modified nucleotide
  modified_base 69: mod_base = OTHER; note = 2'-O-methyl modified nucleotide
  modified_base 70: mod_base = OTHER; note = 2'-O-methyl modified nucleotide
  modified_base 71: mod_base = OTHER; note = 2'-O-methyl modified nucleotide
  modified_base 72: mod_base = OTHER; note = 2'-O-methyl modified nucleotide
  modified_base 73: mod_base = OTHER; note = 2'-O-methyl modified nucleotide
  modified_base 74: mod_base = OTHER; note = 2'-O-methyl modified nucleotide
  modified_base 75: mod_base = OTHER; note = 2'-O-methyl modified nucleotide
  modified_base 76: mod_base = OTHER; note = 2'-O-methyl modified nucleotide
  modified_base 77: mod_base = OTHER; note = 2'-O-methyl modified nucleotide
  modified_base 78: mod_base = OTHER; note = 2'-O-methyl modified nucleotide
  modified_base 79: mod_base = OTHER; note = 2'-O-methyl modified nucleotide
  modified_base 80: mod_base = OTHER; note = 2'-O-methyl modified nucleotide
  modified_base 81: mod_base = OTHER; note = 2'-O-methyl modified nucleotide
  modified_base 82: mod_base = OTHER; note = 2'-O-methyl modified nucleotide
  modified_base 83: mod_base = OTHER; note = 2'-O-methyl modified nucleotide
  modified_base 84: mod_base = OTHER; note = 2'-O-methyl modified nucleotide
  modified_base 85: mod_base = OTHER; note = 2'-O-methyl modified nucleotide
  modified_base 86: mod_base = OTHER; note = 2'-O-methyl modified nucleotide
  modified_base 87: mod_base = OTHER; note = 2'-O-methyl modified nucleotide
  modified_base 88: mod_base = OTHER; note = 2'-O-methyl modified nucleotide
  modified_base 89: mod_base = OTHER; note = 2'-O-methyl modified nucleotide
  modified_base 90: mod_base = OTHER; note = 2'-O-methyl modified nucleotide
  modified_base 91: mod_base = OTHER; note = 2'-O-methyl modified nucleotide
  modified_base 92: mod_base = OTHER; note = 2'-O-methyl modified nucleotide
  modified_base 93: mod_base = OTHER; note = 2'-O-methyl modified nucleotide
  modified_base 94: mod_base = OTHER; note = 2'-O-methyl modified nucleotide
  modified_base 95: mod_base = OTHER; note = 2'-O-methyl modified nucleotide
  modified_base 96: mod_base = OTHER; note = 2'-O-methyl modified nucleotide
  modified_base 128: mod_base = OTHER; note = Nucleotide with phosphorothioate linkage
  modified_base 129: mod_base = OTHER; note = 2'-O-methyl modified nucleotide with phosphorothioate linkage
  modified_base 130: mod_base = OTHER; note = 2'-O-methyl modified nucleotide with phosphorothioate linkage
  modified_base 131: mod_base = OTHER; note = 2'-O-methyl modified nucleotide
gagaatcaaaatcggtgaatgttttagagctagaaatagcaagttaaaataaggctagtccgttatcaacttgaaaaagtggcaccgagtcggtgcagtctgtctgccttagttgaattcaccgattttga

SEQ ID NO: 16237 - RNA, 130 nt, synthetic construct
  source 1..130: mol_type = other RNA
  modified_base 1: mod_base = OTHER; note = 2'-O-methyl modified nucleotide with phosphorothioate linkage
  modified_base 2: mod_base = OTHER; note = 2'-O-methyl modified nucleotide with phosphorothioate linkage
  modified_base 3: mod_base = OTHER; note = 2'-O-methyl modified nucleotide with phosphorothioate linkage
  modified_base 29: mod_base = OTHER; note = 2'-O-methyl modified nucleotide
  modified_base 30: mod_base = OTHER; note = 2'-O-methyl modified nucleotide
  modified_base 31: mod_base = OTHER; note = 2'-O-methyl modified nucleotide
  modified_base 32: mod_base = OTHER; note = 2'-O-methyl modified nucleotide
  modified_base 33: mod_base = OTHER; note = 2'-O-methyl modified nucleotide
  modified_base 34: mod_base = OTHER; note = 2'-O-methyl modified nucleotide
  modified_base 35: mod_base = OTHER; note = 2'-O-methyl modified nucleotide
  modified_base 36: mod_base = OTHER; note = 2'-O-methyl modified nucleotide
  modified_base 37: mod_base = OTHER; note = 2'-O-methyl modified nucleotide
  modified_base 38: mod_base = OTHER; note = 2'-O-methyl modified nucleotide
  modified_base 39: mod_base = OTHER; note = 2'-O-methyl modified nucleotide
  modified_base 40: mod_base = OTHER; note = 2'-O-methyl modified nucleotide
  modified_base 69: mod_base = OTHER; note = 2'-O-methyl modified nucleotide
  modified_base 70: mod_base = OTHER; note = 2'-O-methyl modified nucleotide
  modified_base 71: mod_base = OTHER; note = 2'-O-methyl modified nucleotide
  modified_base 72: mod_base = OTHER; note = 2'-O-methyl modified nucleotide
  modified_base 73: mod_base = OTHER; note = 2'-O-methyl modified nucleotide
  modified_base 74: mod_base = OTHER; note = 2'-O-methyl modified nucleotide
  modified_base 75: mod_base = OTHER; note = 2'-O-methyl modified nucleotide
  modified_base 76: mod_base = OTHER; note = 2'-O-methyl modified nucleotide
  modified_base 77: mod_base = OTHER; note = 2'-O-methyl modified nucleotide
  modified_base 78: mod_base = OTHER; note = 2'-O-methyl modified nucleotide
  modified_base 79: mod_base = OTHER; note = 2'-O-methyl modified nucleotide
  modified_base 80: mod_base = OTHER; note = 2'-O-methyl modified nucleotide
  modified_base 81: mod_base = OTHER; note = 2'-O-methyl modified nucleotide
  modified_base 82: mod_base = OTHER; note = 2'-O-methyl modified nucleotide
  modified_base 83: mod_base = OTHER; note = 2'-O-methyl modified nucleotide
  modified_base 84: mod_base = OTHER; note = 2'-O-methyl modified nucleotide
  modified_base 85: mod_base = OTHER; note = 2'-O-methyl modified nucleotide
  modified_base 86: mod_base = OTHER; note = 2'-O-methyl modified nucleotide
  modified_base 87: mod_base = OTHER; note = 2'-O-methyl modified nucleotide
  modified_base 88: mod_base = OTHER; note = 2'-O-methyl modified nucleotide
  modified_base 89: mod_base = OTHER; note = 2'-O-methyl modified nucleotide
  modified_base 90: mod_base = OTHER; note = 2'-O-methyl modified nucleotide
  modified_base 91: mod_base = OTHER; note = 2'-O-methyl modified nucleotide
  modified_base 92: mod_base = OTHER; note = 2'-O-methyl modified nucleotide
  modified_base 93: mod_base = OTHER; note = 2'-O-methyl modified nucleotide
  modified_base 94: mod_base = OTHER; note = 2'-O-methyl modified nucleotide
  modified_base 95: mod_base = OTHER; note = 2'-O-methyl modified nucleotide
  modified_base 96: mod_base = OTHER; note = 2'-O-methyl modified nucleotide
  modified_base 127: mod_base = OTHER; note = Nucleotide with phosphorothioate linkage
  modified_base 128: mod_base = OTHER; note = 2'-O-methyl modified nucleotide with phosphorothioate linkage
  modified_base 129: mod_base = OTHER; note = 2'-O-methyl modified nucleotide with phosphorothioate linkage
  modified_base 130: mod_base = OTHER; note = 2'-O-methyl modified nucleotide
gagaatcaaaatcggtgaatgttttagagctagaaatagcaagttaaaataaggctagtccgttatcaacttgaaaaagtggcaccgagtcggtgcagtctgtctgccttagttgaattcaccgattttg

SEQ ID NO: 16238 - RNA, 129 nt, synthetic construct
  source 1..129: mol_type = other RNA
  modified_base 1: mod_base = OTHER; note = 2'-O-methyl modified nucleotide with phosphorothioate linkage
  modified_base 2: mod_base = OTHER; note = 2'-O-methyl modified nucleotide with phosphorothioate linkage
  modified_base 3: mod_base = OTHER; note = 2'-O-methyl modified nucleotide with phosphorothioate linkage
  modified_base 29: mod_base = OTHER; note = 2'-O-methyl modified nucleotide
  modified_base 30: mod_base = OTHER; note = 2'-O-methyl modified nucleotide
  modified_base 31: mod_base = OTHER; note = 2'-O-methyl modified nucleotide
  modified_base 32: mod_base = OTHER; note = 2'-O-methyl modified nucleotide
  modified_base 33: mod_base = OTHER; note = 2'-O-methyl modified nucleotide
  modified_base 34: mod_base = OTHER; note = 2'-O-methyl modified nucleotide
  modified_base 35: mod_base = OTHER; note = 2'-O-methyl modified nucleotide
  modified_base 36: mod_base = OTHER; note = 2'-O-methyl modified nucleotide
  modified_base 37: mod_base = OTHER; note = 2'-O-methyl modified nucleotide
  modified_base 38: mod_base = OTHER; note = 2'-O-methyl modified nucleotide
  modified_base 39: mod_base = OTHER; note = 2'-O-methyl modified nucleotide
  modified_base 40: mod_base = OTHER; note = 2'-O-methyl modified nucleotide
  modified_base 69: mod_base = OTHER; note = 2'-O-methyl modified nucleotide
  modified_base 70: mod_base = OTHER; note = 2'-O-methyl modified nucleotide
  modified_base 71: mod_base = OTHER; note = 2'-O-methyl modified nucleotide
  modified_base 72: mod_base = OTHER; note = 2'-O-methyl modified nucleotide
  modified_base 73: mod_base = OTHER; note = 2'-O-methyl modified nucleotide
  modified_base 74: mod_base = OTHER; note = 2'-O-methyl modified nucleotide
  modified_base 75: mod_base = OTHER; note = 2'-O-methyl modified nucleotide
  modified_base 76: mod_base = OTHER; note = 2'-O-methyl modified nucleotide
  modified_base 77: mod_base = OTHER; note = 2'-O-methyl modified nucleotide
  modified_base 78: mod_base = OTHER; note = 2'-O-methyl modified nucleotide
  modified_base 79: mod_base = OTHER; note = 2'-O-methyl modified nucleotide
  modified_base 80: mod_base = OTHER; note = 2'-O-methyl modified nucleotide
  modified_base 81: mod_base = OTHER; note = 2'-O-methyl modified nucleotide
  modified_base 82: mod_base = OTHER; note = 2'-O-methyl modified nucleotide
  modified_base 83: mod_base = OTHER; note = 2'-O-methyl modified nucleotide
  modified_base 84: mod_base = OTHER; note = 2'-O-methyl modified nucleotide
  modified_base 85: mod_base = OTHER; note = 2'-O-methyl modified nucleotide
  modified_base 86: mod_base = OTHER; note = 2'-O-methyl modified nucleotide
  modified_base 87: mod_base = OTHER; note = 2'-O-methyl modified nucleotide
  modified_base 88: mod_base = OTHER; note = 2'-O-methyl modified nucleotide
  modified_base 89: mod_base = OTHER; note = 2'-O-methyl modified nucleotide
  modified_base 90: mod_base = OTHER; note = 2'-O-methyl modified nucleotide
  modified_base 91: mod_base = OTHER; note = 2'-O-methyl modified nucleotide
  modified_base 92: mod_base = OTHER; note = 2'-O-methyl modified nucleotide
  modified_base 93: mod_base = OTHER; note = 2'-O-methyl modified nucleotide
  modified_base 94: mod_base = OTHER; note = 2'-O-methyl modified nucleotide
  modified_base 95: mod_base = OTHER; note = 2'-O-methyl modified nucleotide
  modified_base 96: mod_base = OTHER; note = 2'-O-methyl modified nucleotide
  modified_base 126: mod_base = OTHER; note = Nucleotide with phosphorothioate linkage
  modified_base 127: mod_base = OTHER; note = 2'-O-methyl modified nucleotide with phosphorothioate linkage
  modified_base 128: mod_base = OTHER; note = 2'-O-methyl modified nucleotide with phosphorothioate linkage
  modified_base 129: mod_base = OTHER; note = 2'-O-methyl modified nucleotide
gagaatcaaaatcggtgaatgttttagagctagaaatagcaagttaaaataaggctagtccgttatcaacttgaaaaagtggcaccgagtcggtgcagtctgtctgccttagttgaattcaccgatttt

SEQ ID NO: 16239 - RNA, 128 nt, synthetic construct
  source 1..128: mol_type = other RNA
  modified_base 1: mod_base = OTHER; note = 2'-O-methyl modified nucleotide with phosphorothioate linkage
  modified_base 2: mod_base = OTHER; note = 2'-O-methyl modified nucleotide with phosphorothioate linkage
  modified_base 3: mod_base = OTHER; note = 2'-O-methyl modified nucleotide with phosphorothioate linkage
  modified_base 29: mod_base = OTHER; note = 2'-O-methyl modified nucleotide
  modified_base 30: mod_base = OTHER; note = 2'-O-methyl modified nucleotide
  modified_base 31: mod_base = OTHER; note = 2'-O-methyl modified nucleotide
  modified_base 32: mod_base = OTHER; note = 2'-O-methyl modified nucleotide
  modified_base 33: mod_base = OTHER; note = 2'-O-methyl modified nucleotide
  modified_base 34: mod_base = OTHER; note = 2'-O-methyl modified nucleotide
  modified_base 35: mod_base = OTHER; note = 2'-O-methyl modified nucleotide
  modified_base 36: mod_base = OTHER; note = 2'-O-methyl modified nucleotide
  modified_base 37: mod_base = OTHER; note = 2'-O-methyl modified nucleotide
  modified_base 38: mod_base = OTHER; note = 2'-O-methyl modified nucleotide
  modified_base 39: mod_base = OTHER; note = 2'-O-methyl modified nucleotide
  modified_base 40: mod_base = OTHER; note = 2'-O-methyl modified nucleotide
  modified_base 69: mod_base = OTHER; note = 2'-O-methyl modified nucleotide
  modified_base 70: mod_base = OTHER; note = 2'-O-methyl modified nucleotide
  modified_base 71: mod_base = OTHER; note = 2'-O-methyl modified nucleotide
  modified_base 72: mod_base = OTHER; note = 2'-O-methyl modified nucleotide
  modified_base 73: mod_base = OTHER; note = 2'-O-methyl modified nucleotide
  modified_base 74: mod_base = OTHER; note = 2'-O-methyl modified nucleotide
  modified_base 75: mod_base = OTHER; note = 2'-O-methyl modified nucleotide
  modified_base 76: mod_base = OTHER; note = 2'-O-methyl modified nucleotide
  modified_base 77: mod_base = OTHER; note = 2'-O-methyl modified nucleotide
  modified_base 78: mod_base = OTHER; note = 2'-O-methyl modified nucleotide
  modified_base 79: mod_base = OTHER; note = 2'-O-methyl modified nucleotide
  modified_base 80: mod_base = OTHER; note = 2'-O-methyl modified nucleotide
  modified_base 81: mod_base = OTHER; note = 2'-O-methyl modified nucleotide
  modified_base 82: mod_base = OTHER; note = 2'-O-methyl modified nucleotide
  modified_base 83: mod_base = OTHER; note = 2'-O-methyl modified nucleotide
  modified_base 84: mod_base = OTHER; note = 2'-O-methyl modified nucleotide
  modified_base 85: mod_base = OTHER; note = 2'-O-methyl modified nucleotide
  modified_base 86: mod_base = OTHER; note = 2'-O-methyl modified nucleotide
  modified_base 87: mod_base = OTHER; note = 2'-O-methyl modified nucleotide
  modified_base 88: mod_base = OTHER; note = 2'-O-methyl modified nucleotide
  modified_base 89: mod_base = OTHER; note = 2'-O-methyl modified nucleotide
  modified_base 90: mod_base = OTHER; note = 2'-O-methyl modified nucleotide
  modified_base 91: mod_base = OTHER; note = 2'-O-methyl modified nucleotide
  modified_base 92: mod_base = OTHER; note = 2'-O-methyl modified nucleotide
  modified_base 93: mod_base = OTHER; note = 2'-O-methyl modified nucleotide
  modified_base 94: mod_base = OTHER; note = 2'-O-methyl modified nucleotide
  modified_base 95: mod_base = OTHER; note = 2'-O-methyl modified nucleotide
  modified_base 96: mod_base = OTHER; note = 2'-O-methyl modified nucleotide
  modified_base 125: mod_base = OTHER; note = Nucleotide with phosphorothioate linkage
  modified_base 126: mod_base = OTHER; note = 2'-O-methyl modified nucleotide with phosphorothioate linkage
  modified_base 127: mod_base = OTHER; note = 2'-O-methyl modified nucleotide with phosphorothioate linkage
  modified_base 128: mod_base = OTHER; note = 2'-O-methyl modified nucleotide
gagaatcaaaatcggtgaatgttttagagctagaaatagcaagttaaaataaggctagtccgttatcaacttgaaaaagtggcaccgagtcggtgcagtctgtctgccttagttgaattcaccgattt

SEQ ID NO: 16240 - RNA, 127 nt, synthetic construct
  source 1..127: mol_type = other RNA
  modified_base 1: mod_base = OTHER; note = 2'-O-methyl modified nucleotide with phosphorothioate linkage
  modified_base 2: mod_base = OTHER; note = 2'-O-methyl modified nucleotide with phosphorothioate linkage
  modified_base 3: mod_base = OTHER; note = 2'-O-methyl modified nucleotide with phosphorothioate linkage
  modified_base 29: mod_base = OTHER; note = 2'-O-methyl modified nucleotide
  modified_base 30: mod_base = OTHER; note = 2'-O-methyl modified nucleotide
  modified_base 31: mod_base = OTHER; note = 2'-O-methyl modified nucleotide
  modified_base 32: mod_base = OTHER; note = 2'-O-methyl modified nucleotide
  modified_base 33: mod_base = OTHER; note = 2'-O-methyl modified nucleotide
  modified_base 34: mod_base = OTHER; note = 2'-O-methyl modified nucleotide
  modified_base 35: mod_base = OTHER; note = 2'-O-methyl modified nucleotide
  modified_base 36: mod_base = OTHER; note = 2'-O-methyl modified nucleotide
  modified_base 37: mod_base = OTHER; note = 2'-O-methyl modified nucleotide
  modified_base 38: mod_base = OTHER; note = 2'-O-methyl modified nucleotide
  modified_base 39: mod_base = OTHER; note = 2'-O-methyl modified nucleotide
  modified_base 40: mod_base = OTHER; note = 2'-O-methyl modified nucleotide
  modified_base 69: mod_base = OTHER; note = 2'-O-methyl modified nucleotide
  modified_base 70: mod_base = OTHER; note = 2'-O-methyl modified nucleotide
  modified_base 71: mod_base = OTHER; note = 2'-O-methyl modified nucleotide
  modified_base 72: mod_base = OTHER; note = 2'-O-methyl modified nucleotide
  modified_base 73: mod_base = OTHER; note = 2'-O-methyl modified nucleotide
  modified_base 74: mod_base = OTHER; note = 2'-O-methyl modified nucleotide
  modified_base 75: mod_base = OTHER; note = 2'-O-methyl modified nucleotide
  modified_base 76: mod_base = OTHER; note = 2'-O-methyl modified nucleotide
  modified_base 77: mod_base = OTHER; note = 2'-O-methyl modified nucleotide
  modified_base 78: mod_base = OTHER; note = 2'-O-methyl modified nucleotide
  modified_base 79: mod_base = OTHER; note = 2'-O-methyl modified nucleotide
  modified_base 80: mod_base = OTHER; note = 2'-O-methyl modified nucleotide
  modified_base 81: mod_base = OTHER; note = 2'-O-methyl modified nucleotide
  modified_base 82: mod_base = OTHER; note = 2'-O-methyl modified nucleotide
  modified_base 83: mod_base = OTHER; note = 2'-O-methyl modified nucleotide
  modified_base 84: mod_base = OTHER; note = 2'-O-methyl modified nucleotide
  modified_base 85: mod_base = OTHER; note = 2'-O-methyl modified nucleotide
  modified_base 86: mod_base = OTHER; note = 2'-O-methyl modified nucleotide
  modified_base 87: mod_base = OTHER; note = 2'-O-methyl modified nucleotide
  modified_base 88: mod_base = OTHER; note = 2'-O-methyl modified nucleotide
  modified_base 89: mod_base = OTHER; note = 2'-O-methyl modified nucleotide
  modified_base 90: mod_base = OTHER; note = 2'-O-methyl modified nucleotide
  modified_base 91: mod_base = OTHER; note = 2'-O-methyl modified nucleotide
  modified_base 92: mod_base = OTHER; note = 2'-O-methyl modified nucleotide
  modified_base 93: mod_base = OTHER; note = 2'-O-methyl modified nucleotide
  modified_base 94: mod_base = OTHER; note = 2'-O-methyl modified nucleotide
  modified_base 95: mod_base = OTHER; note = 2'-O-methyl modified nucleotide
  modified_base 96: mod_base = OTHER; note = 2'-O-methyl modified nucleotide
  modified_base 124: mod_base = OTHER; note = Nucleotide with phosphorothioate linkage
  modified_base 125: mod_base = OTHER; note = 2'-O-methyl modified nucleotide with phosphorothioate linkage
  modified_base 126: mod_base = OTHER; note = 2'-O-methyl modified nucleotide with phosphorothioate linkage
  modified_base 127: mod_base = OTHER; note = 2'-O-methyl modified nucleotide
gagaatcaaaatcggtgaatgttttagagctagaaatagcaagttaaaataaggctagtccgttatcaacttgaaaaagtggcaccgagtcggtgcagtctgtctgccttagttgaattcaccgatt

SEQ ID NO: 16241 - RNA, 134 nt, synthetic construct
  source 1..134: mol_type = other RNA
  modified_base 1: mod_base = OTHER; note = 2'-O-methyl modified nucleotide with phosphorothioate linkage
  modified_base 2: mod_base = OTHER; note = 2'-O-methyl modified nucleotide with phosphorothioate linkage
  modified_base 3: mod_base = OTHER; note = 2'-O-methyl modified nucleotide with phosphorothioate linkage
  modified_base 29: mod_base = OTHER; note = 2'-O-methyl modified nucleotide
  modified_base 30: mod_base = OTHER; note = 2'-O-methyl modified nucleotide
  modified_base 31: mod_base = OTHER; note = 2'-O-methyl modified nucleotide
  modified_base 32: mod_base = OTHER; note = 2'-O-methyl modified nucleotide
  modified_base 33: mod_base = OTHER; note = 2'-O-methyl modified nucleotide
  modified_base 34: mod_base = OTHER; note = 2'-O-methyl modified nucleotide
  modified_base 35: mod_base = OTHER; note = 2'-O-methyl modified nucleotide
  modified_base 36: mod_base = OTHER; note = 2'-O-methyl modified nucleotide
  modified_base 37: mod_base = OTHER; note = 2'-O-methyl modified nucleotide
  modified_base 38: mod_base = OTHER; note = 2'-O-methyl modified nucleotide
  modified_base 39: mod_base = OTHER; note = 2'-O-methyl modified nucleotide
  modified_base 40: mod_base = OTHER; note = 2'-O-methyl modified nucleotide
  modified_base 69: mod_base = OTHER; note = 2'-O-methyl modified nucleotide
  modified_base 70: mod_base = OTHER; note = 2'-O-methyl modified nucleotide
  modified_base 71: mod_base = OTHER; note = 2'-O-methyl modified nucleotide
  modified_base 72: mod_base = OTHER; note = 2'-O-methyl modified nucleotide
  modified_base 73: mod_base = OTHER; note = 2'-O-methyl modified nucleotide
  modified_base 74: mod_base = OTHER; note = 2'-O-methyl modified nucleotide
  modified_base 75: mod_base = OTHER; note = 2'-O-methyl modified nucleotide
  modified_base 76: mod_base = OTHER; note = 2'-O-methyl modified nucleotide
  modified_base 77: mod_base = OTHER; note = 2'-O-methyl modified nucleotide
  modified_base 78: mod_base = OTHER; note = 2'-O-methyl modified nucleotide
  modified_base 79: mod_base = OTHER; note = 2'-O-methyl modified nucleotide
  modified_base 80: mod_base = OTHER; note = 2'-O-methyl modified nucleotide
  modified_base 81: mod_base = OTHER; note = 2'-O-methyl modified nucleotide
  modified_base 82: mod_base = OTHER; note = 2'-O-methyl modified nucleotide
  modified_base 83: mod_base = OTHER; note = 2'-O-methyl modified nucleotide
  modified_base 84: mod_base = OTHER; note = 2'-O-methyl modified nucleotide
  modified_base 85: mod_base = OTHER; note = 2'-O-methyl modified nucleotide
  modified_base 86: mod_base = OTHER; note = 2'-O-methyl modified nucleotide
  modified_base 87: mod_base = OTHER; note = 2'-O-methyl modified nucleotide
  modified_base 88: mod_base = OTHER; note = 2'-O-methyl modified nucleotide
  modified_base 89: mod_base = OTHER; note = 2'-O-methyl modified nucleotide
  modified_base 90: mod_base = OTHER; note = 2'-O-methyl modified nucleotide
  modified_base 91: mod_base = OTHER; note = 2'-O-methyl modified nucleotide
  modified_base 92: mod_base = OTHER; note = 2'-O-methyl modified nucleotide
  modified_base 93: mod_base = OTHER; note = 2'-O-methyl modified nucleotide
  modified_base 94: mod_base = OTHER; note = 2'-O-methyl modified nucleotide
  modified_base 95: mod_base = OTHER; note = 2'-O-methyl modified nucleotide
  modified_base 96: mod_base = OTHER; note = 2'-O-methyl modified nucleotide
  modified_base 131: mod_base = OTHER; note = Nucleotide with phosphorothioate linkage
  modified_base 132: mod_base = OTHER; note = 2'-O-methyl modified nucleotide with phosphorothioate linkage
  modified_base 133: mod_base = OTHER; note = 2'-O-methyl modified nucleotide with phosphorothioate linkage
  modified_base 134: mod_base = OTHER; note = 2'-O-methyl modified nucleotide
gagaatcaaaatcggtgaatgttttagagctagaaatagcaagttaaaataaggctagtccgttatcaacttgaaaaagtggcaccgagtcggtgccaagtctgtctgccttagttgaattcaccgattttgat

SEQ ID NO: 16242 - RNA, 133 nt, synthetic construct
  source 1..133: mol_type = other RNA
  modified_base 1: mod_base = OTHER; note = 2'-O-methyl modified nucleotide with phosphorothioate linkage
  modified_base 2: mod_base = OTHER; note = 2'-O-methyl modified nucleotide with phosphorothioate linkage
  modified_base 3: mod_base = OTHER; note = 2'-O-methyl modified nucleotide with phosphorothioate linkage
  modified_base 29: mod_base = OTHER; note = 2'-O-methyl modified nucleotide
  modified_base 30: mod_base = OTHER; note = 2'-O-methyl modified nucleotide
  modified_base 31: mod_base = OTHER; note = 2'-O-methyl modified nucleotide
  modified_base 32: mod_base = OTHER; note = 2'-O-methyl modified nucleotide
  modified_base 33: mod_base = OTHER; note = 2'-O-methyl modified nucleotide
  modified_base 34: mod_base = OTHER; note = 2'-O-methyl modified nucleotide
  modified_base 35: mod_base = OTHER; note = 2'-O-methyl modified nucleotide
  modified_base 36: mod_base = OTHER; note = 2'-O-methyl modified nucleotide
  modified_base 37: mod_base = OTHER; note = 2'-O-methyl modified nucleotide
  modified_base 38: mod_base = OTHER; note = 2'-O-methyl modified nucleotide
  modified_base 39: mod_base = OTHER; note = 2'-O-methyl modified nucleotide
  modified_base 40: mod_base = OTHER; note = 2'-O-methyl modified nucleotide
  modified_base 69: mod_base = OTHER; note = 2'-O-methyl modified nucleotide
  modified_base 70: mod_base = OTHER; note = 2'-O-methyl modified nucleotide
  modified_base 71: mod_base = OTHER; note = 2'-O-methyl modified nucleotide
  modified_base 72: mod_base = OTHER; note = 2'-O-methyl modified nucleotide
  modified_base 73: mod_base = OTHER; note = 2'-O-methyl modified nucleotide
  modified_base 74: mod_base = OTHER; note = 2'-O-methyl modified nucleotide
  modified_base 75: mod_base = OTHER; note = 2'-O-methyl modified nucleotide
  modified_base 76: mod_base = OTHER; note = 2'-O-methyl modified nucleotide
  modified_base 77: mod_base = OTHER; note = 2'-O-methyl modified nucleotide
  modified_base 78: mod_base = OTHER; note = 2'-O-methyl modified nucleotide
  modified_base 79: mod_base = OTHER; note = 2'-O-methyl modified nucleotide
  modified_base 80: mod_base = OTHER; note = 2'-O-methyl modified nucleotide
  modified_base 81: mod_base = OTHER; note = 2'-O-methyl modified nucleotide
  modified_base 82: mod_base = OTHER; note = 2'-O-methyl modified nucleotide
  modified_base 83: mod_base = OTHER; note = 2'-O-methyl modified nucleotide
  modified_base 84: mod_base = OTHER; note = 2'-O-methyl modified nucleotide
  modified_base 85: mod_base = OTHER; note = 2'-O-methyl modified nucleotide
  modified_base 86: mod_base = OTHER; note = 2'-O-methyl modified nucleotide
  modified_base 87: mod_base = OTHER; note = 2'-O-methyl modified nucleotide
  modified_base 88: mod_base = OTHER; note = 2'-O-methyl modified nucleotide
  modified_base 89: mod_base = OTHER; note = 2'-O-methyl modified nucleotide
  modified_base 90: mod_base = OTHER; note = 2'-O-methyl modified nucleotide
  modified_base 91: mod_base = OTHER; note = 2'-O-methyl modified nucleotide
  modified_base 92: mod_base = OTHER; note = 2'-O-methyl modified nucleotide
  modified_base 93: mod_base = OTHER; note = 2'-O-methyl modified nucleotide
  modified_base 94: mod_base = OTHER; note = 2'-O-methyl modified nucleotide
  modified_base 95: mod_base = OTHER; note = 2'-O-methyl modified nucleotide
  modified_base 96: mod_base = OTHER; note = 2'-O-methyl modified nucleotide
  modified_base 130: mod_base = OTHER; note = Nucleotide with phosphorothioate linkage
  modified_base 131: mod_base = OTHER; note = 2'-O-methyl modified nucleotide with phosphorothioate linkage
  modified_base 132: mod_base = OTHER; note = 2'-O-methyl modified nucleotide with phosphorothioate linkage
  modified_base 133: mod_base = OTHER; note = 2'-O-methyl modified nucleotide
gagaatcaaaatcggtgaatgttttagagctagaaatagcaagttaaaataaggctagtccgttatcaacttgaaaaagtggcaccgagtcggtgccaagtctgtctgccttagttgaattcaccgattttga

SEQ ID NO: 16243 - RNA, 132 nt, synthetic construct
  source 1..132: mol_type = other RNA
  modified_base 1: mod_base = OTHER; note = 2'-O-methyl modified nucleotide with phosphorothioate linkage
  modified_base 2: mod_base = OTHER; note = 2'-O-methyl modified nucleotide with phosphorothioate linkage
  modified_base 3: mod_base = OTHER; note = 2'-O-methyl modified nucleotide with phosphorothioate linkage
  modified_base 29: mod_base = OTHER; note = 2'-O-methyl modified nucleotide
  modified_base 30: mod_base = OTHER; note = 2'-O-methyl modified nucleotide
  modified_base 31: mod_base = OTHER; note = 2'-O-methyl modified nucleotide
  modified_base 32: mod_base = OTHER; note = 2'-O-methyl modified nucleotide
  modified_base 33: mod_base = OTHER; note = 2'-O-methyl modified nucleotide
  modified_base 34: mod_base = OTHER; note = 2'-O-methyl modified nucleotide
  modified_base 35: mod_base = OTHER; note = 2'-O-methyl modified nucleotide
  modified_base 36: mod_base = OTHER; note = 2'-O-methyl modified nucleotide
  modified_base 37: mod_base = OTHER; note = 2'-O-methyl modified nucleotide
  modified_base 38: mod_base = OTHER; note = 2'-O-methyl modified nucleotide
  modified_base 39: mod_base = OTHER; note = 2'-O-methyl modified nucleotide
  modified_base 40: mod_base = OTHER; note = 2'-O-methyl modified nucleotide
  modified_base 69: mod_base = OTHER; note = 2'-O-methyl modified nucleotide
  modified_base 70: mod_base = OTHER; note = 2'-O-methyl modified nucleotide
  modified_base 71: mod_base = OTHER; note = 2'-O-methyl modified nucleotide
  modified_base 72: mod_base = OTHER; note = 2'-O-methyl modified nucleotide
  modified_base 73: mod_base = OTHER; note = 2'-O-methyl modified nucleotide
  modified_base 74: mod_base = OTHER; note = 2'-O-methyl modified nucleotide
  modified_base 75: mod_base = OTHER; note = 2'-O-methyl modified nucleotide
  modified_base 76: mod_base = OTHER; note = 2'-O-methyl modified nucleotide
  modified_base 77: mod_base = OTHER; note = 2'-O-methyl modified nucleotide
  modified_base 78: mod_base = OTHER; note = 2'-O-methyl modified nucleotide
  modified_base 79: mod_base = OTHER; note = 2'-O-methyl modified nucleotide
  modified_base 80: mod_base = OTHER; note = 2'-O-methyl modified nucleotide
  modified_base 81: mod_base = OTHER; note = 2'-O-methyl modified nucleotide
  modified_base 82: mod_base = OTHER; note = 2'-O-methyl modified nucleotide
  modified_base 83: mod_base = OTHER; note = 2'-O-methyl modified nucleotide
  modified_base 84: mod_base = OTHER; note = 2'-O-methyl modified nucleotide
  modified_base 85: mod_base = OTHER; note = 2'-O-methyl modified nucleotide
  modified_base 86: mod_base = OTHER; note = 2'-O-methyl modified nucleotide
  modified_base 87: mod_base = OTHER; note = 2'-O-methyl modified nucleotide
  modified_base 88: mod_base = OTHER; note = 2'-O-methyl modified nucleotide
  modified_base 89: mod_base = OTHER; note = 2'-O-methyl modified nucleotide
  modified_base 90: mod_base = OTHER; note = 2'-O-methyl modified nucleotide
  modified_base 91: mod_base = OTHER; note = 2'-O-methyl modified nucleotide
  modified_base 92: mod_base = OTHER; note = 2'-O-methyl modified nucleotide
  modified_base 93: mod_base = OTHER; note = 2'-O-methyl modified nucleotide
  modified_base 94: mod_base = OTHER; note = 2'-O-methyl modified nucleotide
  modified_base 95: mod_base = OTHER; note = 2'-O-methyl modified nucleotide
  modified_base 96: mod_base = OTHER; note = 2'-O-methyl modified nucleotide
  modified_base 129: mod_base = OTHER; note = Nucleotide with phosphorothioate linkage
  modified_base 130: mod_base = OTHER; note = 2'-O-methyl modified nucleotide with phosphorothioate linkage
  modified_base 131: mod_base = OTHER; note = 2'-O-methyl modified nucleotide with phosphorothioate linkage
  modified_base 132: mod_base = OTHER; note = 2'-O-methyl modified nucleotide
gagaatcaaaatcggtgaatgttttagagctagaaatagcaagttaaaataaggctagtccgttatcaacttgaaaaagtggcaccgagtcggtgccaagtctgtctgccttagttgaattcaccgattttg

SEQ ID NO: 16244 - RNA, 131 nt, synthetic construct
  source 1..131: mol_type = other RNA
  modified_base 1: mod_base = OTHER; note = 2'-O-methyl modified nucleotide with phosphorothioate linkage
  modified_base 2: mod_base = OTHER; note = 2'-O-methyl modified nucleotide with phosphorothioate linkage
  modified_base 3: mod_base = OTHER; note = 2'-O-methyl modified nucleotide with phosphorothioate linkage
  modified_base 29: mod_base = OTHER; note = 2'-O-methyl modified nucleotide
  modified_base 30: mod_base = OTHER; note = 2'-O-methyl modified nucleotide
  modified_base 31: mod_base = OTHER; note = 2'-O-methyl modified nucleotide
  modified_base 32: mod_base = OTHER; note = 2'-O-methyl modified nucleotide
  modified_base 33: mod_base = OTHER; note = 2'-O-methyl modified nucleotide
  modified_base 34: mod_base = OTHER; note = 2'-O-methyl modified nucleotide
  modified_base 35: mod_base = OTHER; note = 2'-O-methyl modified nucleotide
  modified_base 36: mod_base = OTHER; note = 2'-O-methyl modified nucleotide
  modified_base 37: mod_base = OTHER; note = 2'-O-methyl modified nucleotide
  modified_base 38: mod_base = OTHER; note = 2'-O-methyl modified nucleotide
  modified_base 39: mod_base = OTHER; note = 2'-O-methyl modified nucleotide
  modified_base 40: mod_base = OTHER; note = 2'-O-methyl modified nucleotide
  modified_base 69: mod_base = OTHER; note = 2'-O-methyl modified nucleotide
  modified_base 70: mod_base = OTHER; note = 2'-O-methyl modified nucleotide
  modified_base 71: mod_base = OTHER; note = 2'-O-methyl modified nucleotide
  modified_base 72: mod_base = OTHER; note = 2'-O-methyl modified nucleotide
  modified_base 73: mod_base = OTHER; note = 2'-O-methyl modified nucleotide
  modified_base 74: mod_base = OTHER; note = 2'-O-methyl modified nucleotide
  modified_base 75: mod_base = OTHER; note = 2'-O-methyl modified nucleotide
  modified_base 76: mod_base = OTHER; note = 2'-O-methyl modified nucleotide
  modified_base 77: mod_base = OTHER; note = 2'-O-methyl modified nucleotide
  modified_base 78: mod_base = OTHER; note = 2'-O-methyl modified nucleotide
  modified_base 79: mod_base = OTHER; note = 2'-O-methyl modified nucleotide
  modified_base 80: mod_base = OTHER; note = 2'-O-methyl modified nucleotide
  modified_base 81: mod_base = OTHER; note = 2'-O-methyl modified nucleotide
  modified_base 82: mod_base = OTHER; note = 2'-O-methyl modified nucleotide
  modified_base 83: mod_base = OTHER; note = 2'-O-methyl modified nucleotide
  modified_base 84: mod_base = OTHER; note = 2'-O-methyl modified nucleotide
  modified_base 85: mod_base = OTHER; note = 2'-O-methyl modified nucleotide
  modified_base 86: mod_base = OTHER; note = 2'-O-methyl modified nucleotide
  modified_base 87: mod_base = OTHER; note = 2'-O-methyl modified nucleotide
  modified_base 88: mod_base = OTHER; note = 2'-O-methyl modified nucleotide
  modified_base 89: mod_base = OTHER; note = 2'-O-methyl modified nucleotide
  modified_base 90: mod_base = OTHER; note = 2'-O-methyl modified nucleotide
  modified_base 91: mod_base = OTHER; note = 2'-O-methyl modified nucleotide
  modified_base 92: mod_base = OTHER; note = 2'-O-methyl modified nucleotide
  modified_base 93: mod_base = OTHER; note = 2'-O-methyl modified nucleotide
  modified_base 94: mod_base = OTHER; note = 2'-O-methyl modified nucleotide
  modified_base 95: mod_base = OTHER; note = 2'-O-methyl modified nucleotide
  modified_base 96: mod_base = OTHER; note = 2'-O-methyl modified nucleotide
  modified_base 128: mod_base = OTHER; note = Nucleotide with phosphorothioate linkage
  modified_base 129: mod_base = OTHER; note = 2'-O-methyl modified nucleotide with phosphorothioate linkage
  modified_base 130: mod_base = OTHER; note = 2'-O-methyl modified nucleotide with phosphorothioate linkage
  modified_base 131: mod_base = OTHER; note = 2'-O-methyl modified nucleotide
gagaatcaaaatcggtgaatgttttagagctagaaatagcaagttaaaataaggctagtccgttatcaacttgaaaaagtggcaccgagtcggtgccaagtctgtctgccttagttgaattcaccgatttt

SEQ ID NO: 16245 - RNA, 130 nt, synthetic construct
  source 1..130: mol_type = other RNA
  modified_base 1: mod_base = OTHER; note = 2'-O-methyl modified nucleotide with phosphorothioate linkage
  modified_base 2: mod_base = OTHER; note = 2'-O-methyl modified nucleotide with phosphorothioate linkage
  modified_base 3: mod_base = OTHER; note = 2'-O-methyl modified nucleotide with phosphorothioate linkage
  modified_base 29: mod_base = OTHER; note = 2'-O-methyl modified nucleotide
  modified_base 30: mod_base = OTHER; note = 2'-O-methyl modified nucleotide
  modified_base 31: mod_base = OTHER; note = 2'-O-methyl modified nucleotide
  modified_base 32: mod_base = OTHER; note = 2'-O-methyl modified nucleotide
  modified_base 33: mod_base = OTHER; note = 2'-O-methyl modified nucleotide
  modified_base 34: mod_base = OTHER; note = 2'-O-methyl modified nucleotide
  modified_base 35: mod_base = OTHER; note = 2'-O-methyl modified nucleotide
  modified_base 36: mod_base = OTHER; note = 2'-O-methyl modified nucleotide
  modified_base 37: mod_base = OTHER; note = 2'-O-methyl modified nucleotide
  modified_base 38: mod_base = OTHER; note = 2'-O-methyl modified nucleotide
  modified_base 39: mod_base = OTHER; note = 2'-O-methyl modified nucleotide
  modified_base 40: mod_base = OTHER; note = 2'-O-methyl modified nucleotide
  modified_base 69: mod_base = OTHER; note = 2'-O-methyl modified nucleotide
  modified_base 70: mod_base = OTHER; note = 2'-O-methyl modified nucleotide
  modified_base 71: mod_base = OTHER; note = 2'-O-methyl modified nucleotide
  modified_base 72: mod_base = OTHER; note = 2'-O-methyl modified nucleotide
  modified_base 73: mod_base = OTHER; note = 2'-O-methyl modified nucleotide
  modified_base 74: mod_base = OTHER; note = 2'-O-methyl modified nucleotide
  modified_base 75: mod_base = OTHER; note = 2'-O-methyl modified nucleotide
  modified_base 76: mod_base = OTHER; note = 2'-O-methyl modified nucleotide
  modified_base 77: mod_base = OTHER; note = 2'-O-methyl modified nucleotide
  modified_base 78: mod_base = OTHER; note = 2'-O-methyl modified nucleotide
  modified_base 79: mod_base = OTHER; note = 2'-O-methyl modified nucleotide
  modified_base 80: mod_base = OTHER; note = 2'-O-methyl modified nucleotide
  modified_base 81: mod_base = OTHER; note = 2'-O-methyl modified nucleotide
  modified_base 82: mod_base = OTHER; note = 2'-O-methyl modified nucleotide
  modified_base 83: mod_base = OTHER; note = 2'-O-methyl modified nucleotide
  modified_base 84: mod_base = OTHER; note = 2'-O-methyl modified nucleotide
  modified_base 85: mod_base = OTHER; note = 2'-O-methyl modified nucleotide
  modified_base 86: mod_base = OTHER; note = 2'-O-methyl modified nucleotide
  modified_base 87: mod_base = OTHER; note = 2'-O-methyl modified nucleotide
  modified_base 88: mod_base = OTHER; note = 2'-O-methyl modified nucleotide
  modified_base 89: mod_base = OTHER; note = 2'-O-methyl modified nucleotide
  modified_base 90: mod_base = OTHER; note = 2'-O-methyl modified nucleotide
  modified_base 91: mod_base = OTHER; note = 2'-O-methyl modified nucleotide
  modified_base 92: mod_base = OTHER; note = 2'-O-methyl modified nucleotide
  modified_base 93: mod_base = OTHER; note = 2'-O-methyl modified nucleotide
  modified_base 94: mod_base = OTHER; note = 2'-O-methyl modified nucleotide
  modified_base 95: mod_base = OTHER; note = 2'-O-methyl modified nucleotide
  modified_base 96: mod_base = OTHER; note = 2'-O-methyl modified nucleotide
  modified_base 127: mod_base = OTHER; note = Nucleotide with phosphorothioate linkage
  modified_base 128: mod_base = OTHER; note = 2'-O-methyl modified nucleotide with phosphorothioate linkage
  modified_base 129: mod_base = OTHER; note = 2'-O-methyl modified nucleotide with phosphorothioate linkage
  modified_base 130: mod_base = OTHER; note = 2'-O-methyl modified nucleotide
gagaatcaaaatcggtgaatgttttagagctagaaatagcaagttaaaataaggctagtccgttatcaacttgaaaaagtggcaccgagtcggtgccaagtctgtctgccttagttgaattcaccgattt

SEQ ID NO: 16246 - RNA, 129 nt, synthetic construct
  source 1..129: mol_type = other RNA
  modified_base 1: mod_base = OTHER; note = 2'-O-methyl modified nucleotide with phosphorothioate linkage
  modified_base 2: mod_base = OTHER; note = 2'-O-methyl modified nucleotide with phosphorothioate linkage
  modified_base 3: mod_base = OTHER; note = 2'-O-methyl modified nucleotide with phosphorothioate linkage
  modified_base 29: mod_base = OTHER; note = 2'-O-methyl modified nucleotide
  modified_base 30: mod_base = OTHER; note = 2'-O-methyl modified nucleotide
  modified_base 31: mod_base = OTHER; note = 2'-O-methyl modified nucleotide
  modified_base 32: mod_base = OTHER; note = 2'-O-methyl modified nucleotide
  modified_base 33: mod_base = OTHER; note = 2'-O-methyl modified nucleotide
  modified_base 34: mod_base = OTHER; note = 2'-O-methyl modified nucleotide
  modified_base 35: mod_base = OTHER; note = 2'-O-methyl modified nucleotide
  modified_base 36: mod_base = OTHER; note = 2'-O-methyl modified nucleotide
  modified_base 37: mod_base = OTHER; note = 2'-O-methyl modified nucleotide
  modified_base 38: mod_base = OTHER; note = 2'-O-methyl modified nucleotide
  modified_base 39: mod_base = OTHER; note = 2'-O-methyl modified nucleotide
  modified_base 40: mod_base = OTHER; note = 2'-O-methyl modified nucleotide
  modified_base 69: mod_base = OTHER; note = 2'-O-methyl modified nucleotide
  modified_base 70: mod_base = OTHER; note = 2'-O-methyl modified nucleotide
  modified_base 71: mod_base = OTHER; note = 2'-O-methyl modified nucleotide
  modified_base 72: mod_base = OTHER; note = 2'-O-methyl modified nucleotide
  modified_base 73: mod_base = OTHER; note = 2'-O-methyl modified nucleotide
  modified_base 74: mod_base = OTHER; note = 2'-O-methyl modified nucleotide
  modified_base 75: mod_base = OTHER; note = 2'-O-methyl modified nucleotide
  modified_base 76: mod_base = OTHER; note = 2'-O-methyl modified nucleotide
  modified_base 77: mod_base = OTHER; note = 2'-O-methyl modified nucleotide
  modified_base 78: mod_base = OTHER; note = 2'-O-methyl modified nucleotide
  modified_base 79: mod_base = OTHER; note = 2'-O-methyl modified nucleotide
  modified_base 80: mod_base = OTHER; note = 2'-O-methyl modified nucleotide
  modified_base 81: mod_base = OTHER; note = 2'-O-methyl modified nucleotide
  modified_base 82: mod_base = OTHER; note = 2'-O-methyl modified nucleotide
  modified_base 83: mod_base = OTHER; note = 2'-O-methyl modified nucleotide
  modified_base 84: mod_base = OTHER; note = 2'-O-methyl modified nucleotide
  modified_base 85: mod_base = OTHER; note = 2'-O-methyl modified nucleotide
  modified_base 86: mod_base = OTHER; note = 2'-O-methyl modified nucleotide
  modified_base 87: mod_base = OTHER; note = 2'-O-methyl modified nucleotide
  modified_base 88: mod_base = OTHER; note = 2'-O-methyl modified nucleotide
  modified_base 89: mod_base = OTHER; note = 2'-O-methyl modified nucleotide
  modified_base 90: mod_base = OTHER; note = 2'-O-methyl modified nucleotide
  modified_base 91: mod_base = OTHER; note = 2'-O-methyl modified nucleotide
  modified_base 92: mod_base = OTHER; note = 2'-O-methyl modified nucleotide
  modified_base 93: mod_base = OTHER; note = 2'-O-methyl modified nucleotide
  modified_base 94: mod_base = OTHER; note = 2'-O-methyl modified nucleotide
  modified_base 95: mod_base = OTHER; note = 2'-O-methyl modified nucleotide
  modified_base 96: mod_base = OTHER; note = 2'-O-methyl modified nucleotide
  modified_base 126: mod_base = OTHER; note = Nucleotide with phosphorothioate linkage
  modified_base 127: mod_base = OTHER; note = 2'-O-methyl modified nucleotide with phosphorothioate linkage
  modified_base 128: mod_base = OTHER; note = 2'-O-methyl modified nucleotide with phosphorothioate linkage
  modified_base 129: mod_base = OTHER; note = 2'-O-methyl modified nucleotide
gagaatcaaaatcggtgaatgttttagagctagaaatagcaagttaaaataaggctagtccgttatcaacttgaaaaagtggcaccgagtcggtgccaagtctgtctgccttagttgaattcaccgatt

SEQ ID NO: 16247 - RNA, 136 nt, synthetic construct
  source 1..136: mol_type = other RNA
  modified_base 1: mod_base = OTHER; note = 2'-O-methyl modified nucleotide with phosphorothioate linkage
  modified_base 2: mod_base = OTHER; note = 2'-O-methyl modified nucleotide with phosphorothioate linkage
  modified_base 3: mod_base = OTHER; note = 2'-O-methyl modified nucleotide with phosphorothioate linkage
  modified_base 29: mod_base = OTHER; note = 2'-O-methyl modified nucleotide
  modified_base 30: mod_base = OTHER; note = 2'-O-methyl modified nucleotide
  modified_base 31: mod_base = OTHER; note = 2'-O-methyl modified nucleotide
  modified_base 32: mod_base = OTHER; note = 2'-O-methyl modified nucleotide
  modified_base 33: mod_base = OTHER; note = 2'-O-methyl modified nucleotide
  modified_base 34: mod_base = OTHER; note = 2'-O-methyl modified nucleotide
  modified_base 35: mod_base = OTHER; note = 2'-O-methyl modified nucleotide
  modified_base 36: mod_base = OTHER; note = 2'-O-methyl modified nucleotide
  modified_base 37: mod_base = OTHER; note = 2'-O-methyl modified nucleotide
  modified_base 38: mod_base = OTHER; note = 2'-O-methyl modified nucleotide
  modified_base 39: mod_base = OTHER; note = 2'-O-methyl modified nucleotide
  modified_base 40: mod_base = OTHER; note = 2'-O-methyl modified nucleotide
  modified_base 69: mod_base = OTHER; note = 2'-O-methyl modified nucleotide
  modified_base 70: mod_base = OTHER; note = 2'-O-methyl modified nucleotide
  modified_base 71: mod_base = OTHER; note = 2'-O-methyl modified nucleotide
  modified_base 72: mod_base = OTHER; note = 2'-O-methyl modified nucleotide
  modified_base 73: mod_base = OTHER; note = 2'-O-methyl modified nucleotide
  modified_base 74: mod_base = OTHER; note = 2'-O-methyl modified nucleotide
  modified_base 75: mod_base = OTHER; note = 2'-O-methyl modified nucleotide
  modified_base 76: mod_base = OTHER; note = 2'-O-methyl modified nucleotide
  modified_base 77: mod_base = OTHER; note = 2'-O-methyl modified nucleotide
  modified_base 78: mod_base = OTHER; note = 2'-O-methyl modified nucleotide
  modified_base 79: mod_base = OTHER; note = 2'-O-methyl modified nucleotide
  modified_base 80: mod_base = OTHER; note = 2'-O-methyl modified nucleotide
  modified_base 81: mod_base = OTHER; note = 2'-O-methyl modified nucleotide
  modified_base 82: mod_base = OTHER; note = 2'-O-methyl modified nucleotide
  modified_base 83: mod_base = OTHER; note = 2'-O-methyl modified nucleotide
  modified_base 84: mod_base = OTHER; note = 2'-O-methyl modified nucleotide
  modified_base 85: mod_base = OTHER; note = 2'-O-methyl modified nucleotide
  modified_base 86: mod_base = OTHER; note = 2'-O-methyl modified nucleotide
  modified_base 87: mod_base = OTHER; note = 2'-O-methyl modified nucleotide
  modified_base 88: mod_base = OTHER; note = 2'-O-methyl modified nucleotide
  modified_base 89: mod_base = OTHER; note = 2'-O-methyl modified nucleotide
  modified_base 90: mod_base = OTHER; note = 2'-O-methyl modified nucleotide
  modified_base 91: mod_base = OTHER; note = 2'-O-methyl modified nucleotide
  modified_base 92: mod_base = OTHER; note = 2'-O-methyl modified nucleotide
  modified_base 93: mod_base = OTHER; note = 2'-O-methyl modified nucleotide
  modified_base 94: mod_base = OTHER; note = 2'-O-methyl modified nucleotide
  modified_base 95: mod_base = OTHER; note = 2'-O-methyl modified nucleotide
  modified_base 96: mod_base = OTHER; note = 2'-O-methyl modified nucleotide
  modified_base 133: mod_base = OTHER; note = Nucleotide with phosphorothioate linkage
  modified_base 134: mod_base = OTHER; note = 2'-O-methyl modified nucleotide with phosphorothioate linkage
  modified_base 135: mod_base = OTHER; note = 2'-O-methyl modified nucleotide with phosphorothioate linkage
  modified_base 136: mod_base = OTHER; note = 2'-O-methyl modified nucleotide
gagaatcaaaatcggtgaatgttttagagctagaaatagcaagttaaaataaggctagtccgttatcaacttgaaaaagtggcaccgagtcggtgcgacaagtctgtctgccttagttgaattcaccgattttgat

SEQ ID NO: 16248 - RNA, 135 nt, synthetic construct
  source 1..135: mol_type = other RNA
  modified_base 1: mod_base = OTHER; note = 2'-O-methyl modified nucleotide with phosphorothioate linkage
  modified_base 2: mod_base = OTHER; note = 2'-O-methyl modified nucleotide with phosphorothioate linkage
  modified_base 3: mod_base = OTHER; note = 2'-O-methyl modified nucleotide with phosphorothioate linkage
  modified_base 29: mod_base = OTHER; note = 2'-O-methyl modified nucleotide
  modified_base 30: mod_base = OTHER; note = 2'-O-methyl modified nucleotide
  modified_base 31: mod_base = OTHER; note = 2'-O-methyl modified nucleotide
  modified_base 32: mod_base = OTHER; note = 2'-O-methyl modified nucleotide
  modified_base 33: mod_base = OTHER; note = 2'-O-methyl modified nucleotide
  modified_base 34: mod_base = OTHER; note = 2'-O-methyl modified nucleotide
  modified_base 35: mod_base = OTHER; note = 2'-O-methyl modified nucleotide
  modified_base 36: mod_base = OTHER; note = 2'-O-methyl modified nucleotide
  modified_base 37: mod_base = OTHER; note = 2'-O-methyl modified nucleotide
  modified_base 38: mod_base = OTHER; note = 2'-O-methyl modified nucleotide
  modified_base 39: mod_base = OTHER; note = 2'-O-methyl modified nucleotide
  modified_base 40: mod_base = OTHER; note = 2'-O-methyl modified nucleotide
  modified_base 69: mod_base = OTHER; note = 2'-O-methyl modified nucleotide
  modified_base 70: mod_base = OTHER; note = 2'-O-methyl modified nucleotide
  modified_base 71: mod_base = OTHER; note = 2'-O-methyl modified nucleotide
  modified_base 72: mod_base = OTHER; note = 2'-O-methyl modified nucleotide
  modified_base 73: mod_base = OTHER; note = 2'-O-methyl modified nucleotide
  modified_base 74: mod_base = OTHER; note = 2'-O-methyl modified nucleotide
  modified_base 75: mod_base = OTHER; note = 2'-O-methyl modified nucleotide
  modified_base 76: mod_base = OTHER; note = 2'-O-methyl modified nucleotide
  modified_base 77: mod_base = OTHER; note = 2'-O-methyl modified nucleotide
  modified_base 78: mod_base = OTHER; note = 2'-O-methyl modified nucleotide
  modified_base 79: mod_base = OTHER; note = 2'-O-methyl modified nucleotide
  modified_base 80: mod_base = OTHER; note = 2'-O-methyl modified nucleotide
  modified_base 81: mod_base = OTHER; note = 2'-O-methyl modified nucleotide
  modified_base 82: mod_base = OTHER; note = 2'-O-methyl modified nucleotide
  modified_base 83: mod_base = OTHER; note = 2'-O-methyl modified nucleotide
  modified_base 84: mod_base = OTHER; note = 2'-O-methyl modified nucleotide
  modified_base 85: mod_base = OTHER; note = 2'-O-methyl modified nucleotide
  modified_base 86: mod_base = OTHER; note = 2'-O-methyl modified nucleotide
  modified_base 87: mod_base = OTHER; note = 2'-O-methyl modified nucleotide
  modified_base 88: mod_base = OTHER; note = 2'-O-methyl modified nucleotide
  modified_base 89: mod_base = OTHER; note = 2'-O-methyl modified nucleotide
  modified_base 90: mod_base = OTHER; note = 2'-O-methyl modified nucleotide
  modified_base 91: mod_base = OTHER; note = 2'-O-methyl modified nucleotide
  modified_base 92: mod_base = OTHER; note = 2'-O-methyl modified nucleotide
  modified_base 93: mod_base = OTHER; note = 2'-O-methyl modified nucleotide
  modified_base 94: mod_base = OTHER; note = 2'-O-methyl modified nucleotide
  modified_base 95: mod_base = OTHER; note = 2'-O-methyl modified nucleotide
  modified_base 96: mod_base = OTHER; note = 2'-O-methyl modified nucleotide
  modified_base 132: mod_base = OTHER; note = Nucleotide with phosphorothioate linkage
  modified_base 133: mod_base = OTHER; note = 2'-O-methyl modified nucleotide with phosphorothioate linkage
  modified_base 134: mod_base = OTHER; note = 2'-O-methyl modified nucleotide with phosphorothioate linkage
  modified_base 135: mod_base = OTHER; note = 2'-O-methyl modified nucleotide
gagaatcaaaatcggtgaatgttttagagctagaaatagcaagttaaaataaggctagtccgttatcaacttgaaaaagtggcaccgagtcggtgcgacaagtctgtctgccttagttgaattcaccgattttga

SEQ ID NO: 16249 - RNA, 134 nt, synthetic construct
  source 1..134: mol_type = other RNA
  modified_base 1: mod_base = OTHER; note = 2'-O-methyl modified nucleotide with phosphorothioate linkage
  modified_base 2: mod_base = OTHER; note = 2'-O-methyl modified nucleotide with phosphorothioate linkage
  modified_base 3: mod_base = OTHER; note = 2'-O-methyl modified nucleotide with phosphorothioate linkage
  modified_base 29: mod_base = OTHER; note = 2'-O-methyl modified nucleotide
  modified_base 30: mod_base = OTHER; note = 2'-O-methyl modified nucleotide
  modified_base 31: mod_base = OTHER; note = 2'-O-methyl modified nucleotide
  modified_base 32: mod_base = OTHER; note = 2'-O-methyl modified nucleotide
  modified_base 33: mod_base = OTHER; note = 2'-O-methyl modified nucleotide
  modified_base 34: mod_base = OTHER; note = 2'-O-methyl modified nucleotide
  modified_base 35: mod_base = OTHER; note = 2'-O-methyl modified nucleotide
  modified_base 36: mod_base = OTHER; note = 2'-O-methyl modified nucleotide
  modified_base 37: mod_base = OTHER; note = 2'-O-methyl modified nucleotide
  modified_base 38: mod_base = OTHER; note = 2'-O-methyl modified nucleotide
  modified_base 39: mod_base = OTHER; note = 2'-O-methyl modified nucleotide
  modified_base 40: mod_base = OTHER; note = 2'-O-methyl modified nucleotide
  modified_base 69: mod_base = OTHER; note = 2'-O-methyl modified nucleotide
  modified_base 70: mod_base = OTHER; note = 2'-O-methyl modified nucleotide
  modified_base 71: mod_base = OTHER; note = 2'-O-methyl modified nucleotide
  modified_base 72: mod_base = OTHER; note = 2'-O-methyl modified nucleotide
  modified_base 73: mod_base = OTHER; note = 2'-O-methyl modified nucleotide
  modified_base 74: mod_base = OTHER; note = 2'-O-methyl modified nucleotide
  modified_base 75: mod_base = OTHER; note = 2'-O-methyl modified nucleotide
  modified_base 76: mod_base = OTHER; note = 2'-O-methyl modified nucleotide
  modified_base 77: mod_base = OTHER; note = 2'-O-methyl modified nucleotide
  modified_base 78: mod_base = OTHER; note = 2'-O-methyl modified nucleotide
  modified_base 79: mod_base = OTHER; note = 2'-O-methyl modified nucleotide
  modified_base 80: mod_base = OTHER; note = 2'-O-methyl modified nucleotide
  modified_base 81: mod_base = OTHER; note = 2'-O-methyl modified nucleotide
  modified_base 82: mod_base = OTHER; note = 2'-O-methyl modified nucleotide
  modified_base 83: mod_base = OTHER; note = 2'-O-methyl modified nucleotide
  modified_base 84: mod_base = OTHER; note = 2'-O-methyl modified nucleotide
  modified_base 85: mod_base = OTHER; note = 2'-O-methyl modified nucleotide
  modified_base 86: mod_base = OTHER; note = 2'-O-methyl modified nucleotide
  modified_base 87: mod_base = OTHER; note = 2'-O-methyl modified nucleotide
  modified_base 88: mod_base = OTHER; note = 2'-O-methyl modified nucleotide
  modified_base 89: mod_base = OTHER; note = 2'-O-methyl modified nucleotide
  modified_base 90: mod_base = OTHER; note = 2'-O-methyl modified nucleotide
  modified_base 91: mod_base = OTHER; note = 2'-O-methyl modified nucleotide
  modified_base 92: mod_base = OTHER; note = 2'-O-methyl modified nucleotide
  modified_base 93: mod_base = OTHER; note = 2'-O-methyl modified nucleotide
  modified_base 94: mod_base = OTHER; note = 2'-O-methyl modified nucleotide
  modified_base 95: mod_base = OTHER; note = 2'-O-methyl modified nucleotide
  modified_base 96: mod_base = OTHER; note = 2'-O-methyl modified nucleotide
  modified_base 131: mod_base = OTHER; note = Nucleotide with phosphorothioate linkage
  modified_base 132: mod_base = OTHER; note = 2'-O-methyl modified nucleotide with phosphorothioate linkage
  modified_base 133: mod_base = OTHER; note = 2'-O-methyl modified nucleotide with phosphorothioate linkage
  modified_base 134: mod_base = OTHER; note = 2'-O-methyl modified nucleotide
gagaatcaaaatcggtgaatgttttagagctagaaatagcaagttaaaataaggctagtccgttatcaacttgaaaaagtggcaccgagtcggtgcgacaagtctgtctgccttagttgaattcaccgattttg

SEQ ID NO: 16250 - RNA, 133 nt, synthetic construct
  source 1..133: mol_type = other RNA
  modified_base 1: mod_base = OTHER; note = 2'-O-methyl modified nucleotide with phosphorothioate linkage
  modified_base 2: mod_base = OTHER; note = 2'-O-methyl modified nucleotide with phosphorothioate linkage
  modified_base 3: mod_base = OTHER; note = 2'-O-methyl modified nucleotide with phosphorothioate linkage
  modified_base 29: mod_base = OTHER; note = 2'-O-methyl modified nucleotide
  modified_base 30: mod_base = OTHER; note = 2'-O-methyl modified nucleotide
  modified_base 31: mod_base = OTHER; note = 2'-O-methyl modified nucleotide
  modified_base 32: mod_base = OTHER; note = 2'-O-methyl modified nucleotide
  modified_base 33: mod_base = OTHER; note = 2'-O-methyl modified nucleotide
  modified_base 34: mod_base = OTHER; note = 2'-O-methyl modified nucleotide
  modified_base 35: mod_base = OTHER; note = 2'-O-methyl modified nucleotide
  modified_base 36: mod_base = OTHER; note = 2'-O-methyl modified nucleotide
  modified_base 37: mod_base = OTHER; note = 2'-O-methyl modified nucleotide
  modified_base 38: mod_base = OTHER; note = 2'-O-methyl modified nucleotide
  modified_base 39: mod_base = OTHER; note = 2'-O-methyl modified nucleotide
  modified_base 40: mod_base = OTHER; note = 2'-O-methyl modified nucleotide
  modified_base 69: mod_base = OTHER; note = 2'-O-methyl modified nucleotide
  modified_base 70: mod_base = OTHER; note = 2'-O-methyl modified nucleotide
  modified_base 71: mod_base = OTHER; note = 2'-O-methyl modified nucleotide
  modified_base 72: mod_base = OTHER; note = 2'-O-methyl modified nucleotide
  modified_base 73: mod_base = OTHER; note = 2'-O-methyl modified nucleotide
  modified_base 74: mod_base = OTHER; note = 2'-O-methyl modified nucleotide
  modified_base 75: mod_base = OTHER; note = 2'-O-methyl modified nucleotide
  modified_base 76: mod_base = OTHER; note = 2'-O-methyl modified nucleotide
  modified_base 77: mod_base = OTHER; note = 2'-O-methyl modified nucleotide
  modified_base 78: mod_base = OTHER; note = 2'-O-methyl modified nucleotide
  modified_base 79: mod_base = OTHER; note = 2'-O-methyl modified nucleotide
  modified_base 80: mod_base = OTHER; note = 2'-O-methyl modified nucleotide
  modified_base 81: mod_base = OTHER; note = 2'-O-methyl modified nucleotide
  modified_base 82: mod_base = OTHER; note = 2'-O-methyl modified nucleotide
  modified_base 83: mod_base = OTHER; note = 2'-O-methyl modified nucleotide
  modified_base 84: mod_base = OTHER; note = 2'-O-methyl modified nucleotide
  modified_base 85: mod_base = OTHER; note = 2'-O-methyl modified nucleotide
  modified_base 86: mod_base = OTHER; note = 2'-O-methyl modified nucleotide
  modified_base 87: mod_base = OTHER; note = 2'-O-methyl modified nucleotide
  modified_base 88: mod_base = OTHER; note = 2'-O-methyl modified nucleotide
  modified_base 89: mod_base = OTHER; note = 2'-O-methyl modified nucleotide
  modified_base 90: mod_base = OTHER; note = 2'-O-methyl modified nucleotide
  modified_base 91: mod_base = OTHER; note = 2'-O-methyl modified nucleotide
  modified_base 92: mod_base = OTHER; note = 2'-O-methyl modified nucleotide
  modified_base 93: mod_base = OTHER; note = 2'-O-methyl modified nucleotide
  modified_base 94: mod_base = OTHER; note = 2'-O-methyl modified nucleotide
  modified_base 95: mod_base = OTHER; note = 2'-O-methyl modified nucleotide
  modified_base 96: mod_base = OTHER; note = 2'-O-methyl modified nucleotide
  modified_base 130: mod_base = OTHER; note = Nucleotide with phosphorothioate linkage
  modified_base 131: mod_base = OTHER; note = 2'-O-methyl modified nucleotide with phosphorothioate linkage
  modified_base 132: mod_base = OTHER; note = 2'-O-methyl modified nucleotide with phosphorothioate linkage
  modified_base 133: mod_base = OTHER; note = 2'-O-methyl modified nucleotide
gagaatcaaaatcggtgaatgttttagagctagaaatagcaagttaaaataaggctagtccgttatcaacttgaaaaagtggcaccgagtcggtgcgacaagtctgtctgccttagttgaattcaccgatttt

SEQ ID NO: 16251 - RNA, 132 nt, synthetic construct
  source 1..132: mol_type = other RNA
  modified_base 1: mod_base = OTHER; note = 2'-O-methyl modified nucleotide with phosphorothioate linkage
  modified_base 2: mod_base = OTHER; note = 2'-O-methyl modified nucleotide with phosphorothioate linkage
  modified_base 3: mod_base = OTHER; note = 2'-O-methyl modified nucleotide with phosphorothioate linkage
  modified_base 29: mod_base = OTHER; note = 2'-O-methyl modified nucleotide
  modified_base 30: mod_base = OTHER; note = 2'-O-methyl modified nucleotide
  modified_base 31: mod_base = OTHER; note = 2'-O-methyl modified nucleotide
  modified_base 32: mod_base = OTHER; note = 2'-O-methyl modified nucleotide
  modified_base 33: mod_base = OTHER; note = 2'-O-methyl modified nucleotide
  modified_base 34: mod_base = OTHER; note = 2'-O-methyl modified nucleotide
  modified_base 35: mod_base = OTHER; note = 2'-O-methyl modified nucleotide
  modified_base 36: mod_base = OTHER; note = 2'-O-methyl modified nucleotide
  modified_base 37: mod_base = OTHER; note = 2'-O-methyl modified nucleotide
  modified_base 38: mod_base = OTHER; note = 2'-O-methyl modified nucleotide
  modified_base 39: mod_base = OTHER; note = 2'-O-methyl modified nucleotide
  modified_base 40: mod_base = OTHER; note = 2'-O-methyl modified nucleotide
  modified_base 69: mod_base = OTHER; note = 2'-O-methyl modified nucleotide
  modified_base 70: mod_base = OTHER; note = 2'-O-methyl modified nucleotide
  modified_base 71: mod_base = OTHER; note = 2'-O-methyl modified nucleotide
  modified_base 72: mod_base = OTHER; note = 2'-O-methyl modified nucleotide
  modified_base 73: mod_base = OTHER; note = 2'-O-methyl modified nucleotide
  modified_base 74: mod_base = OTHER; note = 2'-O-methyl modified nucleotide
  modified_base 75: mod_base = OTHER; note = 2'-O-methyl modified nucleotide
  modified_base 76: mod_base = OTHER; note = 2'-O-methyl modified nucleotide
  modified_base 77: mod_base = OTHER; note = 2'-O-methyl modified nucleotide
  modified_base 78: mod_base = OTHER; note = 2'-O-methyl modified nucleotide
  modified_base 79: mod_base = OTHER; note = 2'-O-methyl modified nucleotide
  modified_base 80: mod_base = OTHER; note = 2'-O-methyl modified nucleotide
  modified_base 81: mod_base = OTHER; note = 2'-O-methyl modified nucleotide
  modified_base 82: mod_base = OTHER; note = 2'-O-methyl modified nucleotide
  modified_base 83: mod_base = OTHER; note = 2'-O-methyl modified nucleotide
  modified_base 84: mod_base = OTHER; note = 2'-O-methyl modified nucleotide
  modified_base 85: mod_base = OTHER; note = 2'-O-methyl modified nucleotide
  modified_base 86: mod_base = OTHER; note = 2'-O-methyl modified nucleotide
  modified_base 87: mod_base = OTHER; note = 2'-O-methyl modified nucleotide
  modified_base 88: mod_base = OTHER; note = 2'-O-methyl modified nucleotide
  modified_base 89: mod_base = OTHER; note = 2'-O-methyl modified nucleotide
  modified_base 90: mod_base = OTHER; note = 2'-O-methyl modified nucleotide
  modified_base 91: mod_base = OTHER; note = 2'-O-methyl modified nucleotide
  modified_base 92: mod_base = OTHER; note = 2'-O-methyl modified nucleotide
  modified_base 93: mod_base = OTHER; note = 2'-O-methyl modified nucleotide
  modified_base 94: mod_base = OTHER; note = 2'-O-methyl modified nucleotide
  modified_base 95: mod_base = OTHER; note = 2'-O-methyl modified nucleotide
  modified_base 96: mod_base = OTHER; note = 2'-O-methyl modified nucleotide
  modified_base 129: mod_base = OTHER; note = Nucleotide with phosphorothioate linkage
  modified_base 130: mod_base = OTHER; note = 2'-O-methyl modified nucleotide with phosphorothioate linkage
  modified_base 131: mod_base = OTHER; note = 2'-O-methyl modified nucleotide with phosphorothioate linkage
  modified_base 132: mod_base = OTHER; note = 2'-O-methyl modified nucleotide
gagaatcaaaatcggtgaatgttttagagctagaaatagcaagttaaaataaggctagtccgttatcaacttgaaaaagtggcaccgagtcggtgcgacaagtctgtctgccttagttgaattcaccgattt

SEQ ID NO: 16252 - RNA, 131 nt, synthetic construct
  source 1..131: mol_type = other RNA
  modified_base 1: mod_base = OTHER; note = 2'-O-methyl modified nucleotide with phosphorothioate linkage
  modified_base 2: mod_base = OTHER; note = 2'-O-methyl modified nucleotide with phosphorothioate linkage
  modified_base 3: mod_base = OTHER; note = 2'-O-methyl modified nucleotide with phosphorothioate linkage
  modified_base 29: mod_base = OTHER; note = 2'-O-methyl modified nucleotide
  modified_base 30: mod_base = OTHER; note = 2'-O-methyl modified nucleotide
  modified_base 31: mod_base = OTHER; note = 2'-O-methyl modified nucleotide
  modified_base 32: mod_base = OTHER; note = 2'-O-methyl modified nucleotide
  modified_base 33: mod_base = OTHER; note = 2'-O-methyl modified nucleotide
  modified_base 34: mod_base = OTHER; note = 2'-O-methyl modified nucleotide
  modified_base 35: mod_base = OTHER; note = 2'-O-methyl modified nucleotide
  modified_base 36: mod_base = OTHER; note = 2'-O-methyl modified nucleotide
  modified_base 37: mod_base = OTHER; note = 2'-O-methyl modified nucleotide
  modified_base 38: mod_base = OTHER; note = 2'-O-methyl modified nucleotide
  modified_base 39: mod_base = OTHER; note = 2'-O-methyl modified nucleotide
  modified_base 40: mod_base = OTHER; note = 2'-O-methyl modified nucleotide
  modified_base 69: mod_base = OTHER; note = 2'-O-methyl modified nucleotide
  modified_base 70: mod_base = OTHER; note = 2'-O-methyl modified nucleotide
  modified_base 71: mod_base = OTHER; note = 2'-O-methyl modified nucleotide
  modified_base 72: mod_base = OTHER; note = 2'-O-methyl modified nucleotide
  modified_base 73: mod_base = OTHER; note = 2'-O-methyl modified nucleotide
  modified_base 74: mod_base = OTHER; note = 2'-O-methyl modified nucleotide
  modified_base 75: mod_base = OTHER; note = 2'-O-methyl modified nucleotide
  modified_base 76: mod_base = OTHER; note = 2'-O-methyl modified nucleotide
  modified_base 77: mod_base = OTHER; note = 2'-O-methyl modified nucleotide
  modified_base 78: mod_base = OTHER; note = 2'-O-methyl modified nucleotide
  modified_base 79: mod_base = OTHER; note = 2'-O-methyl modified nucleotide
  modified_base 80: mod_base = OTHER; note = 2'-O-methyl modified nucleotide
  modified_base 81: mod_base = OTHER; note = 2'-O-methyl modified nucleotide
  modified_base 82: mod_base = OTHER; note = 2'-O-methyl modified nucleotide
  modified_base 83: mod_base = OTHER; note = 2'-O-methyl modified nucleotide
  modified_base 84: mod_base = OTHER; note = 2'-O-methyl modified nucleotide
  modified_base 85: mod_base = OTHER; note = 2'-O-methyl modified nucleotide
  modified_base 86: mod_base = OTHER; note = 2'-O-methyl modified nucleotide
  modified_base 87: mod_base = OTHER; note = 2'-O-methyl modified nucleotide
  modified_base 88: mod_base = OTHER; note = 2'-O-methyl modified nucleotide
  modified_base 89: mod_base = OTHER; note = 2'-O-methyl modified nucleotide
  modified_base 90: mod_base = OTHER; note = 2'-O-methyl modified nucleotide
  modified_base 91: mod_base = OTHER; note = 2'-O-methyl modified nucleotide
  modified_base 92: mod_base = OTHER; note = 2'-O-methyl modified nucleotide
  modified_base 93: mod_base = OTHER; note = 2'-O-methyl modified nucleotide
  modified_base 94: mod_base = OTHER; note = 2'-O-methyl modified nucleotide
  modified_base 95: mod_base = OTHER; note = 2'-O-methyl modified nucleotide
  modified_base 96: mod_base = OTHER; note = 2'-O-methyl modified nucleotide
  modified_base 128: mod_base = OTHER; note = Nucleotide with phosphorothioate linkage
  modified_base 129: mod_base = OTHER; note = 2'-O-methyl modified nucleotide with phosphorothioate linkage
  modified_base 130: mod_base = OTHER; note = 2'-O-methyl modified nucleotide with phosphorothioate linkage
  modified_base 131: mod_base = OTHER; note = 2'-O-methyl modified nucleotide
gagaatcaaaatcggtgaatgttttagagctagaaatagcaagttaaaataaggctagtccgttatcaacttgaaaaagtggcaccgagtcggtgcgacaagtctgtctgccttagttgaattcaccgatt

SEQ ID NO: 16253 - RNA, 117 nt, synthetic construct
  source 1..117: mol_type = other RNA
  modified_base 1: mod_base = OTHER; note = 2'-O-methyl modified nucleotide with phosphorothioate linkage
  modified_base 2: mod_base = OTHER; note = 2'-O-methyl modified nucleotide with phosphorothioate linkage
  modified_base 3: mod_base = OTHER; note = 2'-O-methyl modified nucleotide with phosphorothioate linkage
  modified_base 29: mod_base = OTHER; note = 2'-O-methyl modified nucleotide
  modified_base 30: mod_base = OTHER; note = 2'-O-methyl modified nucleotide
  modified_base 31: mod_base = OTHER; note = 2'-O-methyl modified nucleotide
  modified_base 32: mod_base = OTHER; note = 2'-O-methyl modified nucleotide
  modified_base 33: mod_base = OTHER; note = 2'-O-methyl modified nucleotide
  modified_base 34: mod_base = OTHER; note = 2'-O-methyl modified nucleotide
  modified_base 35: mod_base = OTHER; note = 2'-O-methyl modified nucleotide
  modified_base 36: mod_base = OTHER; note = 2'-O-methyl modified nucleotide
  modified_base 37: mod_base = OTHER; note = 2'-O-methyl modified nucleotide
  modified_base 38: mod_base = OTHER; note = 2'-O-methyl modified nucleotide
  modified_base 39: mod_base = OTHER; note = 2'-O-methyl modified nucleotide
  modified_base 40: mod_base = OTHER; note = 2'-O-methyl modified nucleotide
  modified_base 69: mod_base = OTHER; note = 2'-O-methyl modified nucleotide
  modified_base 70: mod_base = OTHER; note = 2'-O-methyl modified nucleotide
  modified_base 71: mod_base = OTHER; note = 2'-O-methyl modified nucleotide
  modified_base 72: mod_base = OTHER; note = 2'-O-methyl modified nucleotide
  modified_base 73: mod_base = OTHER; note = 2'-O-methyl modified nucleotide
  modified_base 74: mod_base = OTHER; note = 2'-O-methyl modified nucleotide
  modified_base 75: mod_base = OTHER; note = 2'-O-methyl modified nucleotide
  modified_base 76: mod_base = OTHER; note = 2'-O-methyl modified nucleotide
  modified_base 77: mod_base = OTHER; note = 2'-O-methyl modified nucleotide
  modified_base 78: mod_base = OTHER; note = 2'-O-methyl modified nucleotide
  modified_base 79: mod_base = OTHER; note = 2'-O-methyl modified nucleotide
  modified_base 80: mod_base = OTHER; note = 2'-O-methyl modified nucleotide
  modified_base 81: mod_base = OTHER; note = 2'-O-methyl modified nucleotide
  modified_base 82: mod_base = OTHER; note = 2'-O-methyl modified nucleotide
  modified_base 83: mod_base = OTHER; note = 2'-O-methyl modified nucleotide
  modified_base 84: mod_base = OTHER; note = 2'-O-methyl modified nucleotide
  modified_base 85: mod_base = OTHER; note = 2'-O-methyl modified nucleotide
  modified_base 86: mod_base = OTHER; note = 2'-O-methyl modified nucleotide
  modified_base 87: mod_base = OTHER; note = 2'-O-methyl modified nucleotide
  modified_base 88: mod_base = OTHER; note = 2'-O-methyl modified nucleotide
  modified_base 89: mod_base = OTHER; note = 2'-O-methyl modified nucleotide
  modified_base 90: mod_base = OTHER; note = 2'-O-methyl modified nucleotide
  modified_base 91: mod_base = OTHER; note = 2'-O-methyl modified nucleotide
  modified_base 92: mod_base = OTHER; note = 2'-O-methyl modified nucleotide
  modified_base 93: mod_base = OTHER; note = 2'-O-methyl modified nucleotide
  modified_base 94: mod_base = OTHER; note = 2'-O-methyl modified nucleotide
  modified_base 95: mod_base = OTHER; note = 2'-O-methyl modified nucleotide
  modified_base 96: mod_base = OTHER; note = 2'-O-methyl modified nucleotide
  modified_base 114: mod_base = OTHER; note = Nucleotide with phosphorothioate linkage
  modified_base 115: mod_base = OTHER; note = 2'-O-methyl modified nucleotide with phosphorothioate linkage
  modified_base 116: mod_base = OTHER; note = 2'-O-methyl modified nucleotide with phosphorothioate linkage
  modified_base 117: mod_base = OTHER; note = 2'-O-methyl modified nucleotide
gagaatcaaaatcggtgaatgttttagagctagaaatagcaagttaaaataaggctagtccgttatcaacttgaaaaagtggcaccgagtcggtgcctgtcattcaccgattttgat

SEQ ID NO: 16254 - RNA, 116 nt, synthetic construct
  source 1..116: mol_type = other RNA
  modified_base 1: mod_base = OTHER; note = 2'-O-methyl modified nucleotide with phosphorothioate linkage
  modified_base 2: mod_base = OTHER; note = 2'-O-methyl modified nucleotide with phosphorothioate linkage
  modified_base 3: mod_base = OTHER; note = 2'-O-methyl modified nucleotide with phosphorothioate linkage
  modified_base 29: mod_base = OTHER; note = 2'-O-methyl modified nucleotide
  modified_base 30: mod_base = OTHER; note = 2'-O-methyl modified nucleotide
  modified_base 31: mod_base = OTHER; note = 2'-O-methyl modified nucleotide
  modified_base 32: mod_base = OTHER; note = 2'-O-methyl modified nucleotide
  modified_base 33: mod_base = OTHER; note = 2'-O-methyl modified nucleotide
  modified_base 34: mod_base = OTHER; note = 2'-O-methyl modified nucleotide
  modified_base 35: mod_base = OTHER; note = 2'-O-methyl modified nucleotide
  modified_base 36: mod_base = OTHER; note = 2'-O-methyl modified nucleotide
  modified_base 37: mod_base = OTHER; note = 2'-O-methyl modified nucleotide
  modified_base 38: mod_base = OTHER; note = 2'-O-methyl modified nucleotide
  modified_base 39: mod_base = OTHER; note = 2'-O-methyl modified nucleotide
  modified_base 40: mod_base = OTHER; note = 2'-O-methyl modified nucleotide
  modified_base 69: mod_base = OTHER; note = 2'-O-methyl modified nucleotide
  modified_base 70: mod_base = OTHER; note = 2'-O-methyl modified nucleotide
  modified_base 71: mod_base = OTHER; note = 2'-O-methyl modified nucleotide
  modified_base 72: mod_base = OTHER; note = 2'-O-methyl modified nucleotide
  modified_base 73: mod_base = OTHER; note = 2'-O-methyl modified nucleotide
  modified_base 74: mod_base = OTHER; note = 2'-O-methyl modified nucleotide
  modified_base 75: mod_base = OTHER; note = 2'-O-methyl modified nucleotide
  modified_base 76: mod_base = OTHER; note = 2'-O-methyl modified nucleotide
  modified_base 77: mod_base = OTHER; note = 2'-O-methyl modified nucleotide
  modified_base 78: mod_base = OTHER; note = 2'-O-methyl modified nucleotide
  modified_base 79: mod_base = OTHER; note = 2'-O-methyl modified nucleotide
  modified_base 80: mod_base = OTHER; note = 2'-O-methyl modified nucleotide
  modified_base 81: mod_base = OTHER; note = 2'-O-methyl modified nucleotide
  modified_base 82: mod_base = OTHER; note = 2'-O-methyl modified nucleotide
  modified_base 83: mod_base = OTHER; note = 2'-O-methyl modified nucleotide
  modified_base 84: mod_base = OTHER; note = 2'-O-methyl modified nucleotide
  modified_base 85: mod_base = OTHER; note = 2'-O-methyl modified nucleotide
  modified_base 86: mod_base = OTHER; note = 2'-O-methyl modified nucleotide
  modified_base 87: mod_base = OTHER; note = 2'-O-methyl modified nucleotide
  modified_base 88: mod_base = OTHER; note = 2'-O-methyl modified nucleotide
  modified_base 89: mod_base = OTHER; note = 2'-O-methyl modified nucleotide
  modified_base 90: mod_base = OTHER; note = 2'-O-methyl modified nucleotide
  modified_base 91: mod_base = OTHER; note = 2'-O-methyl modified nucleotide
  modified_base 92: mod_base = OTHER; note = 2'-O-methyl modified nucleotide
  modified_base 93: mod_base = OTHER; note = 2'-O-methyl modified nucleotide
  modified_base 94: mod_base = OTHER; note = 2'-O-methyl modified nucleotide
  modified_base 95: mod_base = OTHER; note = 2'-O-methyl modified nucleotide
  modified_base 96: mod_base = OTHER; note = 2'-O-methyl modified nucleotide
  modified_base 113: mod_base = OTHER; note = Nucleotide with phosphorothioate linkage
  modified_base 114: mod_base = OTHER; note = 2'-O-methyl modified nucleotide with phosphorothioate linkage
  modified_base 115: mod_base = OTHER; note = 2'-O-methyl modified nucleotide with phosphorothioate linkage
  modified_base 116: mod_base = OTHER; note = 2'-O-methyl modified nucleotide
gagaatcaaaatcggtgaatgttttagagctagaaatagcaagttaaaataaggctagtccgttatcaacttgaaaaagtggcaccgagtcggtgcctgtcattcaccgattttga

SEQ ID NO: 16255 - RNA, 115 nt, synthetic construct
  source 1..115: mol_type = other RNA
  modified_base 1: mod_base = OTHER; note = 2'-O-methyl modified nucleotide with phosphorothioate linkage
  modified_base 2: mod_base = OTHER; note = 2'-O-methyl modified nucleotide with phosphorothioate linkage
  modified_base 3: mod_base = OTHER; note = 2'-O-methyl modified nucleotide with phosphorothioate linkage
  modified_base 29: mod_base = OTHER; note = 2'-O-methyl modified nucleotide
  modified_base 30: mod_base = OTHER; note = 2'-O-methyl modified nucleotide
  modified_base 31: mod_base = OTHER; note = 2'-O-methyl modified nucleotide
  modified_base 32: mod_base = OTHER; note = 2'-O-methyl modified nucleotide
  modified_base 33: mod_base = OTHER; note = 2'-O-methyl modified nucleotide
  modified_base 34: mod_base = OTHER; note = 2'-O-methyl modified nucleotide
  modified_base 35: mod_base = OTHER; note = 2'-O-methyl modified nucleotide
  modified_base 36: mod_base = OTHER; note = 2'-O-methyl modified nucleotide
  modified_base 37: mod_base = OTHER; note = 2'-O-methyl modified nucleotide
  modified_base 38: mod_base = OTHER; note = 2'-O-methyl modified nucleotide
  modified_base 39: mod_base = OTHER; note = 2'-O-methyl modified nucleotide
  modified_base 40: mod_base = OTHER; note = 2'-O-methyl modified nucleotide
  modified_base 69: mod_base = OTHER; note = 2'-O-methyl modified nucleotide
  modified_base 70: mod_base = OTHER; note = 2'-O-methyl modified nucleotide
  modified_base 71: mod_base = OTHER; note = 2'-O-methyl modified nucleotide
  modified_base 72: mod_base = OTHER; note = 2'-O-methyl modified nucleotide
  modified_base 73: mod_base = OTHER; note = 2'-O-methyl modified nucleotide
  modified_base 74: mod_base = OTHER; note = 2'-O-methyl modified nucleotide
  modified_base 75: mod_base = OTHER; note = 2'-O-methyl modified nucleotide
  modified_base 76: mod_base = OTHER; note = 2'-O-methyl modified nucleotide
  modified_base 77: mod_base = OTHER; note = 2'-O-methyl modified nucleotide
  modified_base 78: mod_base = OTHER; note = 2'-O-methyl modified nucleotide
  modified_base 79: mod_base = OTHER; note = 2'-O-methyl modified nucleotide
  modified_base 80: mod_base = OTHER; note = 2'-O-methyl modified nucleotide
  modified_base 81: mod_base = OTHER; note = 2'-O-methyl modified nucleotide
  modified_base 82: mod_base = OTHER; note = 2'-O-methyl modified nucleotide
  modified_base 83: mod_base = OTHER; note = 2'-O-methyl modified nucleotide
  modified_base 84: mod_base = OTHER; note = 2'-O-methyl modified nucleotide
  modified_base 85: mod_base = OTHER; note = 2'-O-methyl modified nucleotide
  modified_base 86: mod_base = OTHER; note = 2'-O-methyl modified nucleotide
  modified_base 87: mod_base = OTHER; note = 2'-O-methyl modified nucleotide
  modified_base 88: mod_base = OTHER; note = 2'-O-methyl modified nucleotide
  modified_base 89: mod_base = OTHER; note = 2'-O-methyl modified nucleotide
  modified_base 90: mod_base = OTHER; note = 2'-O-methyl modified nucleotide
  modified_base 91: mod_base = OTHER; note = 2'-O-methyl modified nucleotide
  modified_base 92: mod_base = OTHER; note = 2'-O-methyl modified nucleotide
  modified_base 93: mod_base = OTHER; note = 2'-O-methyl modified nucleotide
  modified_base 94: mod_base = OTHER; note = 2'-O-methyl modified nucleotide
  modified_base 95: mod_base = OTHER; note = 2'-O-methyl modified nucleotide
  modified_base 96: mod_base = OTHER; note = 2'-O-methyl modified nucleotide
  modified_base 112: mod_base = OTHER; note = Nucleotide with phosphorothioate linkage
  modified_base 113: mod_base = OTHER; note = 2'-O-methyl modified nucleotide with phosphorothioate linkage
  modified_base 114: mod_base = OTHER; note = 2'-O-methyl modified nucleotide with phosphorothioate linkage
  modified_base 115: mod_base = OTHER; note = 2'-O-methyl modified nucleotide
gagaatcaaaatcggtgaatgttttagagctagaaatagcaagttaaaataaggctagtccgttatcaacttgaaaaagtggcaccgagtcggtgcctgtcattcaccgattttg

SEQ ID NO: 16256 - RNA, 114 nt, synthetic construct
  source 1..114: mol_type = other RNA
  modified_base 1: mod_base = OTHER; note = 2'-O-methyl modified nucleotide with phosphorothioate linkage
  modified_base 2: mod_base = OTHER; note = 2'-O-methyl modified nucleotide with phosphorothioate linkage
  modified_base 3: mod_base = OTHER; note = 2'-O-methyl modified nucleotide with phosphorothioate linkage
  modified_base 29: mod_base = OTHER; note = 2'-O-methyl modified nucleotide
  modified_base 30: mod_base = OTHER; note = 2'-O-methyl modified nucleotide
  modified_base 31: mod_base = OTHER; note = 2'-O-methyl modified nucleotide
  modified_base 32: mod_base = OTHER; note = 2'-O-methyl modified nucleotide
  modified_base 33: mod_base = OTHER; note = 2'-O-methyl modified nucleotide
  modified_base 34: mod_base = OTHER; note = 2'-O-methyl modified nucleotide
  modified_base 35: mod_base = OTHER; note = 2'-O-methyl modified nucleotide
  modified_base 36: mod_base = OTHER; note = 2'-O-methyl modified nucleotide
  modified_base 37: mod_base = OTHER; note = 2'-O-methyl modified nucleotide
  modified_base 38: mod_base = OTHER; note = 2'-O-methyl modified nucleotide
  modified_base 39: mod_base = OTHER; note = 2'-O-methyl modified nucleotide
  modified_base 40: mod_base = OTHER; note = 2'-O-methyl modified nucleotide
  modified_base 69: mod_base = OTHER; note = 2'-O-methyl modified nucleotide
  modified_base 70: mod_base = OTHER; note = 2'-O-methyl modified nucleotide
  modified_base 71: mod_base = OTHER; note = 2'-O-methyl modified nucleotide
  modified_base 72: mod_base = OTHER; note = 2'-O-methyl modified nucleotide
  modified_base 73: mod_base = OTHER; note = 2'-O-methyl modified nucleotide
  modified_base 74: mod_base = OTHER; note = 2'-O-methyl modified nucleotide
  modified_base 75: mod_base = OTHER; note = 2'-O-methyl modified nucleotide
  modified_base 76: mod_base = OTHER; note = 2'-O-methyl modified nucleotide
  modified_base 77: mod_base = OTHER; note = 2'-O-methyl modified nucleotide
  modified_base 78: mod_base = OTHER; note = 2'-O-methyl modified nucleotide
  modified_base 79: mod_base = OTHER; note = 2'-O-methyl modified nucleotide
  modified_base 80: mod_base = OTHER; note = 2'-O-methyl modified nucleotide
  modified_base 81: mod_base = OTHER; note = 2'-O-methyl modified nucleotide
  modified_base 82: mod_base = OTHER; note = 2'-O-methyl modified nucleotide
  modified_base 83: mod_base = OTHER; note = 2'-O-methyl modified nucleotide
  modified_base 84: mod_base = OTHER; note = 2'-O-methyl modified nucleotide
  modified_base 85: mod_base = OTHER; note = 2'-O-methyl modified nucleotide
  modified_base 86: mod_base = OTHER; note = 2'-O-methyl modified nucleotide
  modified_base 87: mod_base = OTHER; note = 2'-O-methyl modified nucleotide
  modified_base 88: mod_base = OTHER; note = 2'-O-methyl modified nucleotide
  modified_base 89: mod_base = OTHER; note = 2'-O-methyl modified nucleotide
  modified_base 90: mod_base = OTHER; note = 2'-O-methyl modified nucleotide
  modified_base 91: mod_base = OTHER; note = 2'-O-methyl modified nucleotide
  modified_base 92: mod_base = OTHER; note = 2'-O-methyl modified nucleotide
  modified_base 93: mod_base = OTHER; note = 2'-O-methyl modified nucleotide
  modified_base 94: mod_base = OTHER; note = 2'-O-methyl modified nucleotide
  modified_base 95: mod_base = OTHER; note = 2'-O-methyl modified nucleotide
  modified_base 96: mod_base = OTHER; note = 2'-O-methyl modified nucleotide
  modified_base 111: mod_base = OTHER; note = Nucleotide with phosphorothioate linkage
  modified_base 112: mod_base = OTHER; note = 2'-O-methyl modified nucleotide with phosphorothioate linkage
  modified_base 113: mod_base = OTHER; note = 2'-O-methyl modified nucleotide with phosphorothioate linkage
  modified_base 114: mod_base = OTHER; note = 2'-O-methyl modified nucleotide
gagaatcaaaatcggtgaatgttttagagctagaaatagcaagttaaaataaggctagtccgttatcaacttgaaaaagtggcaccgagtcggtgcctgtcattcaccgatttt

SEQ ID NO: 16257 - RNA, 113 nt, synthetic construct
  source 1..113: mol_type = other RNA
  modified_base 1: mod_base = OTHER; note = 2'-O-methyl modified nucleotide with phosphorothioate linkage
  modified_base 2: mod_base = OTHER; note = 2'-O-methyl modified nucleotide with phosphorothioate linkage
  modified_base 3: mod_base = OTHER; note = 2'-O-methyl modified nucleotide with phosphorothioate linkage
  modified_base 29: mod_base = OTHER; note = 2'-O-methyl modified nucleotide
  modified_base 30: mod_base = OTHER; note = 2'-O-methyl modified nucleotide
  modified_base 31: mod_base = OTHER; note = 2'-O-methyl modified nucleotide
  modified_base 32: mod_base = OTHER; note = 2'-O-methyl modified nucleotide
  modified_base 33: mod_base = OTHER; note = 2'-O-methyl modified nucleotide
  modified_base 34: mod_base = OTHER; note = 2'-O-methyl modified nucleotide
  modified_base 35: mod_base = OTHER; note = 2'-O-methyl modified nucleotide
  modified_base 36: mod_base = OTHER; note = 2'-O-methyl modified nucleotide
  modified_base 37: mod_base = OTHER; note = 2'-O-methyl modified nucleotide
  modified_base 38: mod_base = OTHER; note = 2'-O-methyl modified nucleotide
  modified_base 39: mod_base = OTHER; note = 2'-O-methyl modified nucleotide
  modified_base 40: mod_base = OTHER; note = 2'-O-methyl modified nucleotide
  modified_base 69: mod_base = OTHER; note = 2'-O-methyl modified nucleotide
  modified_base 70: mod_base = OTHER; note = 2'-O-methyl modified nucleotide
  modified_base 71: mod_base = OTHER; note = 2'-O-methyl modified nucleotide
  modified_base 72: mod_base = OTHER; note = 2'-O-methyl modified nucleotide
  modified_base 73: mod_base = OTHER; note = 2'-O-methyl modified nucleotide
  modified_base 74: mod_base = OTHER; note = 2'-O-methyl modified nucleotide
  modified_base 75: mod_base = OTHER; note = 2'-O-methyl modified nucleotide
  modified_base 76: mod_base = OTHER; note = 2'-O-methyl modified nucleotide
  modified_base 77: mod_base = OTHER; note = 2'-O-methyl modified nucleotide
  modified_base 78: mod_base = OTHER; note = 2'-O-methyl modified nucleotide
  modified_base 79: mod_base = OTHER; note = 2'-O-methyl modified nucleotide
  modified_base 80: mod_base = OTHER; note = 2'-O-methyl modified nucleotide
  modified_base 81: mod_base = OTHER; note = 2'-O-methyl modified nucleotide
  modified_base 82: mod_base = OTHER; note = 2'-O-methyl modified nucleotide
  modified_base 83: mod_base = OTHER; note = 2'-O-methyl modified nucleotide
  modified_base 84: mod_base = OTHER; note = 2'-O-methyl modified nucleotide
  modified_base 85: mod_base = OTHER; note = 2'-O-methyl modified nucleotide
  modified_base 86: mod_base = OTHER; note = 2'-O-methyl modified nucleotide
  modified_base 87: mod_base = OTHER; note = 2'-O-methyl modified nucleotide
  modified_base 88: mod_base = OTHER; note = 2'-O-methyl modified nucleotide
  modified_base 89: mod_base = OTHER; note = 2'-O-methyl modified nucleotide
  modified_base 90: mod_base = OTHER; note = 2'-O-methyl modified nucleotide
  modified_base 91: mod_base = OTHER; note = 2'-O-methyl modified nucleotide
  modified_base 92: mod_base = OTHER; note = 2'-O-methyl modified nucleotide
  modified_base 93: mod_base = OTHER; note = 2'-O-methyl modified nucleotide
  modified_base 94: mod_base = OTHER; note = 2'-O-methyl modified nucleotide
  modified_base 95: mod_base = OTHER; note = 2'-O-methyl modified nucleotide
  modified_base 96: mod_base = OTHER; note = 2'-O-methyl modified nucleotide
  modified_base 110: mod_base = OTHER; note = Nucleotide with phosphorothioate linkage
  modified_base 111: mod_base = OTHER; note = 2'-O-methyl modified nucleotide with phosphorothioate linkage
  modified_base 112: mod_base = OTHER; note = 2'-O-methyl modified nucleotide with phosphorothioate linkage
  modified_base 113: mod_base = OTHER; note = 2'-O-methyl modified nucleotide
gagaatcaaaatcggtgaatgttttagagctagaaatagcaagttaaaataaggctagtccgttatcaacttgaaaaagtggcaccgagtcggtgcctgtcattcaccgattt

SEQ ID NO: 16258 - RNA, 112 nt, synthetic construct
  source 1..112: mol_type = other RNA
  modified_base 1: mod_base = OTHER; note = 2'-O-methyl modified nucleotide with phosphorothioate linkage
  modified_base 2: mod_base = OTHER; note = 2'-O-methyl modified nucleotide with phosphorothioate linkage
  modified_base 3: mod_base = OTHER; note = 2'-O-methyl modified nucleotide with phosphorothioate linkage
  modified_base 29: mod_base = OTHER; note = 2'-O-methyl modified nucleotide
  modified_base 30: mod_base = OTHER; note = 2'-O-methyl modified nucleotide
  modified_base 31: mod_base = OTHER; note = 2'-O-methyl modified nucleotide
  modified_base 32: mod_base = OTHER; note = 2'-O-methyl modified nucleotide
  modified_base 33: mod_base = OTHER; note = 2'-O-methyl modified nucleotide
  modified_base 34: mod_base = OTHER; note = 2'-O-methyl modified nucleotide
  modified_base 35: mod_base = OTHER; note = 2'-O-methyl modified nucleotide
  modified_base 36: mod_base = OTHER; note = 2'-O-methyl modified nucleotide
  modified_base 37: mod_base = OTHER; note = 2'-O-methyl modified nucleotide
  modified_base 38: mod_base = OTHER; note = 2'-O-methyl modified nucleotide
  modified_base 39: mod_base = OTHER; note = 2'-O-methyl modified nucleotide
  modified_base 40: mod_base = OTHER; note = 2'-O-methyl modified nucleotide
  modified_base 69: mod_base = OTHER; note = 2'-O-methyl modified nucleotide
  modified_base 70: mod_base = OTHER; note = 2'-O-methyl modified nucleotide
  modified_base 71: mod_base = OTHER; note = 2'-O-methyl modified nucleotide
  modified_base 72: mod_base = OTHER; note = 2'-O-methyl modified nucleotide
  modified_base 73: mod_base = OTHER; note = 2'-O-methyl modified nucleotide
  modified_base 74: mod_base = OTHER; note = 2'-O-methyl modified nucleotide
  modified_base 75: mod_base = OTHER; note = 2'-O-methyl modified nucleotide
  modified_base 76: mod_base = OTHER; note = 2'-O-methyl modified nucleotide
  modified_base 77: mod_base = OTHER; note = 2'-O-methyl modified nucleotide
  modified_base 78: mod_base = OTHER; note = 2'-O-methyl modified nucleotide
  modified_base 79: mod_base = OTHER; note = 2'-O-methyl modified nucleotide
  modified_base 80: mod_base = OTHER; note = 2'-O-methyl modified nucleotide
  modified_base 81: mod_base = OTHER; note = 2'-O-methyl modified nucleotide
  modified_base 82: mod_base = OTHER; note = 2'-O-methyl modified nucleotide
  modified_base 83: mod_base = OTHER; note = 2'-O-methyl modified nucleotide
  modified_base 84: mod_base = OTHER; note = 2'-O-methyl modified nucleotide
  modified_base 85: mod_base = OTHER; note = 2'-O-methyl modified nucleotide
  modified_base 86: mod_base = OTHER; note = 2'-O-methyl modified nucleotide
  modified_base 87: mod_base = OTHER; note = 2'-O-methyl modified nucleotide
  modified_base 88: mod_base = OTHER; note = 2'-O-methyl modified nucleotide
  modified_base 89: mod_base = OTHER; note = 2'-O-methyl modified nucleotide
  modified_base 90: mod_base = OTHER; note = 2'-O-methyl modified nucleotide
  modified_base 91: mod_base = OTHER; note = 2'-O-methyl modified nucleotide
  modified_base 92: mod_base = OTHER; note = 2'-O-methyl modified nucleotide
  modified_base 93: mod_base = OTHER; note = 2'-O-methyl modified nucleotide
  modified_base 94: mod_base = OTHER; note = 2'-O-methyl modified nucleotide
  modified_base 95: mod_base = OTHER; note = 2'-O-methyl modified nucleotide
  modified_base 96: mod_base = OTHER; note = 2'-O-methyl modified nucleotide
  modified_base 109: mod_base = OTHER; note = Nucleotide with phosphorothioate linkage
  modified_base 110: mod_base = OTHER; note = 2'-O-methyl modified nucleotide with phosphorothioate linkage
  modified_base 111: mod_base = OTHER; note = 2'-O-methyl modified nucleotide with phosphorothioate linkage
  modified_base 112: mod_base = OTHER; note = 2'-O-methyl modified nucleotide
gagaatcaaaatcggtgaatgttttagagctagaaatagcaagttaaaataaggctagtccgttatcaacttgaaaaagtggcaccgagtcggtgcctgtcattcaccgatt

SEQ ID NO: 16259 - RNA, 119 nt, synthetic construct
  source 1..119: mol_type = other RNA
  modified_base 1: mod_base = OTHER; note = 2'-O-methyl modified nucleotide with phosphorothioate linkage
  modified_base 2: mod_base = OTHER; note = 2'-O-methyl modified nucleotide with phosphorothioate linkage
  modified_base 3: mod_base = OTHER; note = 2'-O-methyl modified nucleotide with phosphorothioate linkage
  modified_base 29: mod_base = OTHER; note = 2'-O-methyl modified nucleotide
  modified_base 30: mod_base = OTHER; note = 2'-O-methyl modified nucleotide
  modified_base 31: mod_base = OTHER; note = 2'-O-methyl modified nucleotide
  modified_base 32: mod_base = OTHER; note = 2'-O-methyl modified nucleotide
  modified_base 33: mod_base = OTHER; note = 2'-O-methyl modified nucleotide
  modified_base 34: mod_base = OTHER; note = 2'-O-methyl modified nucleotide
  modified_base 35: mod_base = OTHER; note = 2'-O-methyl modified nucleotide
  modified_base 36: mod_base = OTHER; note = 2'-O-methyl modified nucleotide
  modified_base 37: mod_base = OTHER; note = 2'-O-methyl modified nucleotide
  modified_base 38: mod_base = OTHER; note = 2'-O-methyl modified nucleotide
  modified_base 39: mod_base = OTHER; note = 2'-O-methyl modified nucleotide
  modified_base 40: mod_base = OTHER; note = 2'-O-methyl modified nucleotide
  modified_base 69: mod_base = OTHER; note = 2'-O-methyl modified nucleotide
  modified_base 70: mod_base = OTHER; note = 2'-O-methyl modified nucleotide
  modified_base 71: mod_base = OTHER; note = 2'-O-methyl modified nucleotide
  modified_base 72: mod_base = OTHER; note = 2'-O-methyl modified nucleotide
  modified_base 73: mod_base = OTHER; note = 2'-O-methyl modified nucleotide
  modified_base 74: mod_base = OTHER; note = 2'-O-methyl modified nucleotide
  modified_base 75: mod_base = OTHER; note = 2'-O-methyl modified nucleotide
  modified_base 76: mod_base = OTHER; note = 2'-O-methyl modified nucleotide
  modified_base 77: mod_base = OTHER; note = 2'-O-methyl modified nucleotide
  modified_base 78: mod_base = OTHER; note = 2'-O-methyl modified nucleotide
  modified_base 79: mod_base = OTHER; note = 2'-O-methyl modified nucleotide
  modified_base 80: mod_base = OTHER; note = 2'-O-methyl modified nucleotide
  modified_base 81: mod_base = OTHER; note = 2'-O-methyl modified nucleotide
  modified_base 82: mod_base = OTHER; note = 2'-O-methyl modified nucleotide
  modified_base 83: mod_base = OTHER; note = 2'-O-methyl modified nucleotide
  modified_base 84: mod_base = OTHER; note = 2'-O-methyl modified nucleotide
  modified_base 85: mod_base = OTHER; note = 2'-O-methyl modified nucleotide
  modified_base 86: mod_base = OTHER; note = 2'-O-methyl modified nucleotide
  modified_base 87: mod_base = OTHER; note = 2'-O-methyl modified nucleotide
  modified_base 88: mod_base = OTHER; note = 2'-O-methyl modified nucleotide
  modified_base 89: mod_base = OTHER; note = 2'-O-methyl modified nucleotide
  modified_base 90: mod_base = OTHER; note = 2'-O-methyl modified nucleotide
  modified_base 91: mod_base = OTHER; note = 2'-O-methyl modified nucleotide
  modified_base 92: mod_base = OTHER; note = 2'-O-methyl modified nucleotide
  modified_base 93: mod_base = OTHER; note = 2'-O-methyl modified nucleotide
  modified_base 94: mod_base = OTHER; note = 2'-O-methyl modified nucleotide
  modified_base 95: mod_base = OTHER; note = 2'-O-methyl modified nucleotide
  modified_base 96: mod_base = OTHER; note = 2'-O-methyl modified nucleotide
  modified_base 116: mod_base = OTHER; note = Nucleotide with phosphorothioate linkage
  modified_base 117: mod_base = OTHER; note = 2'-O-methyl modified nucleotide with phosphorothioate linkage
  modified_base 118: mod_base = OTHER; note = 2'-O-methyl modified nucleotide with phosphorothioate linkage
  modified_base 119: mod_base = OTHER; note = 2'-O-methyl modified nucleotide
gagaatcaaaatcggtgaatgttttagagctagaaatagcaagttaaaataaggctagtccgttatcaacttgaaaaagtggcaccgagtcggtgcgtctgtcattcaccgattttgat

SEQ ID NO: 16260 - RNA, 118 nt, synthetic construct
  source 1..118: mol_type = other RNA
  modified_base 1: mod_base = OTHER; note = 2'-O-methyl modified nucleotide with phosphorothioate linkage
  modified_base 2: mod_base = OTHER; note = 2'-O-methyl modified nucleotide with phosphorothioate linkage
  modified_base 3: mod_base = OTHER; note = 2'-O-methyl modified nucleotide with phosphorothioate linkage
  modified_base 29: mod_base = OTHER; note = 2'-O-methyl modified nucleotide
  modified_base 30: mod_base = OTHER; note = 2'-O-methyl modified nucleotide
  modified_base 31: mod_base = OTHER; note = 2'-O-methyl modified nucleotide
  modified_base 32: mod_base = OTHER; note = 2'-O-methyl modified nucleotide
  modified_base 33: mod_base = OTHER; note = 2'-O-methyl modified nucleotide
  modified_base 34: mod_base = OTHER; note = 2'-O-methyl modified nucleotide
  modified_base 35: mod_base = OTHER; note = 2'-O-methyl modified nucleotide
  modified_base 36: mod_base = OTHER; note = 2'-O-methyl modified nucleotide
  modified_base 37: mod_base = OTHER; note = 2'-O-methyl modified nucleotide
  modified_base 38: mod_base = OTHER; note = 2'-O-methyl modified nucleotide
  modified_base 39: mod_base = OTHER; note = 2'-O-methyl modified nucleotide
  modified_base 40: mod_base = OTHER; note = 2'-O-methyl modified nucleotide
  modified_base 69: mod_base = OTHER; note = 2'-O-methyl modified nucleotide
  modified_base 70: mod_base = OTHER; note = 2'-O-methyl modified nucleotide
  modified_base 71: mod_base = OTHER; note = 2'-O-methyl modified nucleotide
  modified_base 72: mod_base = OTHER; note = 2'-O-methyl modified nucleotide
  modified_base 73: mod_base = OTHER; note = 2'-O-methyl modified nucleotide
  modified_base 74: mod_base = OTHER; note = 2'-O-methyl modified nucleotide
  modified_base 75: mod_base = OTHER; note = 2'-O-methyl modified nucleotide
  modified_base 76: mod_base = OTHER; note = 2'-O-methyl modified nucleotide
  modified_base 77: mod_base = OTHER; note = 2'-O-methyl modified nucleotide
  modified_base 78: mod_base = OTHER; note = 2'-O-methyl modified nucleotide
  modified_base 79: mod_base = OTHER; note = 2'-O-methyl modified nucleotide
  modified_base 80: mod_base = OTHER; note = 2'-O-methyl modified nucleotide
  modified_base 81: mod_base = OTHER; note = 2'-O-methyl modified nucleotide
  modified_base 82: mod_base = OTHER; note = 2'-O-methyl modified nucleotide
  modified_base 83: mod_base = OTHER; note = 2'-O-methyl modified nucleotide
  modified_base 84: mod_base = OTHER; note = 2'-O-methyl modified nucleotide
  modified_base 85: mod_base = OTHER; note = 2'-O-methyl modified nucleotide
  modified_base 86: mod_base = OTHER; note = 2'-O-methyl modified nucleotide
  modified_base 87: mod_base = OTHER; note = 2'-O-methyl modified nucleotide
  modified_base 88: mod_base = OTHER; note = 2'-O-methyl modified nucleotide
  modified_base 89: mod_base = OTHER; note = 2'-O-methyl modified nucleotide
  modified_base 90: mod_base = OTHER; note = 2'-O-methyl modified nucleotide
  modified_base 91: mod_base = OTHER; note = 2'-O-methyl modified nucleotide
  modified_base 92: mod_base = OTHER; note = 2'-O-methyl modified nucleotide
  modified_base 93: mod_base = OTHER; note = 2'-O-methyl modified nucleotide
  modified_base 94: mod_base = OTHER; note = 2'-O-methyl modified nucleotide
  modified_base 95: mod_base = OTHER; note = 2'-O-methyl modified nucleotide
  modified_base 96: mod_base = OTHER; note = 2'-O-methyl modified nucleotide
  modified_base 115: mod_base = OTHER; note = Nucleotide with phosphorothioate linkage
  modified_base 116: mod_base = OTHER; note = 2'-O-methyl modified nucleotide with phosphorothioate linkage
  modified_base 117: mod_base = OTHER; note = 2'-O-methyl modified nucleotide with phosphorothioate linkage
  modified_base 118: mod_base = OTHER; note = 2'-O-methyl modified nucleotide
gagaatcaaaatcggtgaatgttttagagctagaaatagcaagttaaaataaggctagtccgttatcaacttgaaaaagtggcaccgagtcggtgcgtctgtcattcaccgattttga

SEQ ID NO: 16261 - RNA, 117 nt, synthetic construct
  source 1..117: mol_type = other RNA
  modified_base 1: mod_base = OTHER; note = 2'-O-methyl modified nucleotide with phosphorothioate linkage
  modified_base 2: mod_base = OTHER; note = 2'-O-methyl modified nucleotide with phosphorothioate linkage
  modified_base 3: mod_base = OTHER; note = 2'-O-methyl modified nucleotide with phosphorothioate linkage
  modified_base 29: mod_base = OTHER; note = 2'-O-methyl modified nucleotide
  modified_base 30: mod_base = OTHER; note = 2'-O-methyl modified nucleotide
  modified_base 31: mod_base = OTHER; note = 2'-O-methyl modified nucleotide
  modified_base 32: mod_base = OTHER; note = 2'-O-methyl modified nucleotide
  modified_base 33: mod_base = OTHER; note = 2'-O-methyl modified nucleotide
  modified_base 34: mod_base = OTHER; note = 2'-O-methyl modified nucleotide
  modified_base 35: mod_base = OTHER; note = 2'-O-methyl modified nucleotide
  modified_base 36: mod_base = OTHER; note = 2'-O-methyl modified nucleotide
  modified_base 37: mod_base = OTHER; note = 2'-O-methyl modified nucleotide
  modified_base 38: mod_base = OTHER; note = 2'-O-methyl modified nucleotide
  modified_base 39: mod_base = OTHER; note = 2'-O-methyl modified nucleotide
  modified_base 40: mod_base = OTHER; note = 2'-O-methyl modified nucleotide
  modified_base 69: mod_base = OTHER; note = 2'-O-methyl modified nucleotide
  modified_base 70: mod_base = OTHER; note = 2'-O-methyl modified nucleotide
  modified_base 71: mod_base = OTHER; note = 2'-O-methyl modified nucleotide
  modified_base 72: mod_base = OTHER; note = 2'-O-methyl modified nucleotide
  modified_base 73: mod_base = OTHER; note = 2'-O-methyl modified nucleotide
  modified_base 74: mod_base = OTHER; note = 2'-O-methyl modified nucleotide
  modified_base 75: mod_base = OTHER; note = 2'-O-methyl modified nucleotide
  modified_base 76: mod_base = OTHER; note = 2'-O-methyl modified nucleotide
  modified_base 77: mod_base = OTHER; note = 2'-O-methyl modified nucleotide
  modified_base 78: mod_base = OTHER; note = 2'-O-methyl modified nucleotide
  modified_base 79: mod_base = OTHER; note = 2'-O-methyl modified nucleotide
  modified_base 80: mod_base = OTHER; note = 2'-O-methyl modified nucleotide
  modified_base 81: mod_base = OTHER; note = 2'-O-methyl modified nucleotide
  modified_base 82: mod_base = OTHER; note = 2'-O-methyl modified nucleotide
  modified_base 83: mod_base = OTHER; note = 2'-O-methyl modified nucleotide
  modified_base 84: mod_base = OTHER; note = 2'-O-methyl modified nucleotide
  modified_base 85: mod_base = OTHER; note = 2'-O-methyl modified nucleotide
  modified_base 86: mod_base = OTHER; note = 2'-O-methyl modified nucleotide
  modified_base 87: mod_base = OTHER; note = 2'-O-methyl modified nucleotide
  modified_base 88: mod_base = OTHER; note = 2'-O-methyl modified nucleotide
  modified_base 89: mod_base = OTHER; note = 2'-O-methyl modified nucleotide
  modified_base 90: mod_base = OTHER; note = 2'-O-methyl modified nucleotide
  modified_base 91: mod_base = OTHER; note = 2'-O-methyl modified nucleotide
  modified_base 92: mod_base = OTHER; note = 2'-O-methyl modified nucleotide
  modified_base 93: mod_base = OTHER; note = 2'-O-methyl modified nucleotide
  modified_base 94: mod_base = OTHER; note = 2'-O-methyl modified nucleotide
  modified_base 95: mod_base = OTHER; note = 2'-O-methyl modified nucleotide
  modified_base 96: mod_base = OTHER; note = 2'-O-methyl modified nucleotide
  modified_base 114: mod_base = OTHER; note = Nucleotide with phosphorothioate linkage
  modified_base 115: mod_base = OTHER; note = 2'-O-methyl modified nucleotide with phosphorothioate linkage
  modified_base 116: mod_base = OTHER; note = 2'-O-methyl modified nucleotide with phosphorothioate linkage
  modified_base 117: mod_base = OTHER; note = 2'-O-methyl modified nucleotide
gagaatcaaaatcggtgaatgttttagagctagaaatagcaagttaaaataaggctagtccgttatcaacttgaaaaagtggcaccgagtcggtgcgtctgtcattcaccgattttg

SEQ ID NO: 16262 - RNA, 116 nt, synthetic construct
  source 1..116: mol_type = other RNA
  modified_base 1: mod_base = OTHER; note = 2'-O-methyl modified nucleotide with phosphorothioate linkage
  modified_base 2: mod_base = OTHER; note = 2'-O-methyl modified nucleotide with phosphorothioate linkage
  modified_base 3: mod_base = OTHER; note = 2'-O-methyl modified nucleotide with phosphorothioate linkage
  modified_base 29: mod_base = OTHER; note = 2'-O-methyl modified nucleotide
  modified_base 30: mod_base = OTHER; note = 2'-O-methyl modified nucleotide
  modified_base 31: mod_base = OTHER; note = 2'-O-methyl modified nucleotide
  modified_base 32: mod_base = OTHER; note = 2'-O-methyl modified nucleotide
  modified_base 33: mod_base = OTHER; note = 2'-O-methyl modified nucleotide
  modified_base 34: mod_base = OTHER; note = 2'-O-methyl modified nucleotide
  modified_base 35: mod_base = OTHER; note = 2'-O-methyl modified nucleotide
  modified_base 36: mod_base = OTHER; note = 2'-O-methyl modified nucleotide
  modified_base 37: mod_base = OTHER; note = 2'-O-methyl modified nucleotide
  modified_base 38: mod_base = OTHER; note = 2'-O-methyl modified nucleotide
  modified_base 39: mod_base = OTHER; note = 2'-O-methyl modified nucleotide
  modified_base 40: mod_base = OTHER; note = 2'-O-methyl modified nucleotide
  modified_base 69: mod_base = OTHER; note = 2'-O-methyl modified nucleotide
  modified_base 70: mod_base = OTHER; note = 2'-O-methyl modified nucleotide
  modified_base 71: mod_base = OTHER; note = 2'-O-methyl modified nucleotide
  modified_base 72: mod_base = OTHER; note = 2'-O-methyl modified nucleotide
  modified_base 73: mod_base = OTHER; note = 2'-O-methyl modified nucleotide
  modified_base 74: mod_base = OTHER; note = 2'-O-methyl modified nucleotide
  modified_base 75: mod_base = OTHER; note = 2'-O-methyl modified nucleotide
  modified_base 76: mod_base = OTHER; note = 2'-O-methyl modified nucleotide
  modified_base 77: mod_base = OTHER; note = 2'-O-methyl modified nucleotide
  modified_base 78: mod_base = OTHER; note = 2'-O-methyl modified nucleotide
  modified_base 79: mod_base = OTHER; note = 2'-O-methyl modified nucleotide
  modified_base 80: mod_base = OTHER; note = 2'-O-methyl modified nucleotide
  modified_base 81: mod_base = OTHER; note = 2'-O-methyl modified nucleotide
  modified_base 82: mod_base = OTHER; note = 2'-O-methyl modified nucleotide
  modified_base 83: mod_base = OTHER; note = 2'-O-methyl modified nucleotide
  modified_base 84: mod_base = OTHER; note = 2'-O-methyl modified nucleotide
  modified_base 85: mod_base = OTHER; note = 2'-O-methyl modified nucleotide
  modified_base 86: mod_base = OTHER; note = 2'-O-methyl modified nucleotide
  modified_base 87: mod_base = OTHER; note = 2'-O-methyl modified nucleotide
  modified_base 88: mod_base = OTHER; note = 2'-O-methyl modified nucleotide
  modified_base 89: mod_base = OTHER; note = 2'-O-methyl modified nucleotide
  modified_base 90: mod_base = OTHER; note = 2'-O-methyl modified nucleotide
  modified_base 91: mod_base = OTHER; note = 2'-O-methyl modified nucleotide
  modified_base 92: mod_base = OTHER; note = 2'-O-methyl modified nucleotide
  modified_base 93: mod_base = OTHER; note = 2'-O-methyl modified nucleotide
  modified_base 94: mod_base = OTHER; note = 2'-O-methyl modified nucleotide
  modified_base 95: mod_base = OTHER; note = 2'-O-methyl modified nucleotide
  modified_base 96: mod_base = OTHER; note = 2'-O-methyl modified nucleotide
  modified_base 113: mod_base = OTHER; note = Nucleotide with phosphorothioate linkage
  modified_base 114: mod_base = OTHER; note = 2'-O-methyl modified nucleotide with phosphorothioate linkage
  modified_base 115: mod_base = OTHER; note = 2'-O-methyl modified nucleotide with phosphorothioate linkage
  modified_base 116: mod_base = OTHER; note = 2'-O-methyl modified nucleotide
gagaatcaaaatcggtgaatgttttagagctagaaatagcaagttaaaataaggctagtccgttatcaacttgaaaaagtggcaccgagtcggtgcgtctgtcattcaccgatttt

SEQ ID NO: 16263 - RNA, 115 nt, synthetic construct
  source 1..115: mol_type = other RNA
  modified_base 1: mod_base = OTHER; note = 2'-O-methyl modified nucleotide with phosphorothioate linkage
  modified_base 2: mod_base = OTHER; note = 2'-O-methyl modified nucleotide with phosphorothioate linkage
  modified_base 3: mod_base = OTHER; note = 2'-O-methyl modified nucleotide with phosphorothioate linkage
  modified_base 29: mod_base = OTHER; note = 2'-O-methyl modified nucleotide
  modified_base 30: mod_base = OTHER; note = 2'-O-methyl modified nucleotide
  modified_base 31: mod_base = OTHER; note = 2'-O-methyl modified nucleotide
  modified_base 32: mod_base = OTHER; note = 2'-O-methyl modified nucleotide
  modified_base 33: mod_base = OTHER; note = 2'-O-methyl modified nucleotide
  modified_base 34: mod_base = OTHER; note = 2'-O-methyl modified nucleotide
  modified_base 35: mod_base = OTHER; note = 2'-O-methyl modified nucleotide
  modified_base 36: mod_base = OTHER; note = 2'-O-methyl modified nucleotide
  modified_base 37: mod_base = OTHER; note = 2'-O-methyl modified nucleotide
  modified_base 38: mod_base = OTHER; note = 2'-O-methyl modified nucleotide
  modified_base 39: mod_base = OTHER; note = 2'-O-methyl modified nucleotide
  modified_base 40: mod_base = OTHER; note = 2'-O-methyl modified nucleotide
  modified_base 69: mod_base = OTHER; note = 2'-O-methyl modified nucleotide
  modified_base 70: mod_base = OTHER; note = 2'-O-methyl modified nucleotide
  modified_base 71: mod_base = OTHER; note = 2'-O-methyl modified nucleotide
  modified_base 72: mod_base = OTHER; note = 2'-O-methyl modified nucleotide
  modified_base 73: mod_base = OTHER; note = 2'-O-methyl modified nucleotide
  modified_base 74: mod_base = OTHER; note = 2'-O-methyl modified nucleotide
  modified_base 75: mod_base = OTHER; note = 2'-O-methyl modified nucleotide
  modified_base 76: mod_base = OTHER; note = 2'-O-methyl modified nucleotide
  modified_base 77: mod_base = OTHER; note = 2'-O-methyl modified nucleotide
  modified_base 78: mod_base = OTHER; note = 2'-O-methyl modified nucleotide
  modified_base 79: mod_base = OTHER; note = 2'-O-methyl modified nucleotide
  modified_base 80: mod_base = OTHER; note = 2'-O-methyl modified nucleotide
  modified_base 81: mod_base = OTHER; note = 2'-O-methyl modified nucleotide
  modified_base 82: mod_base = OTHER; note = 2'-O-methyl modified nucleotide
  modified_base 83: mod_base = OTHER; note = 2'-O-methyl modified nucleotide
  modified_base 84: mod_base = OTHER; note = 2'-O-methyl modified nucleotide
  modified_base 85: mod_base = OTHER; note = 2'-O-methyl modified nucleotide
  modified_base 86: mod_base = OTHER; note = 2'-O-methyl modified nucleotide
  modified_base 87: mod_base = OTHER; note = 2'-O-methyl modified nucleotide
  modified_base 88: mod_base = OTHER; note = 2'-O-methyl modified nucleotide
  modified_base 89: mod_base = OTHER; note = 2'-O-methyl modified nucleotide
  modified_base 90: mod_base = OTHER; note = 2'-O-methyl modified nucleotide
  modified_base 91: mod_base = OTHER; note = 2'-O-methyl modified nucleotide
  modified_base 92: mod_base = OTHER; note = 2'-O-methyl modified nucleotide
  modified_base 93: mod_base = OTHER; note = 2'-O-methyl modified nucleotide
  modified_base 94: mod_base = OTHER; note = 2'-O-methyl modified nucleotide
  modified_base 95: mod_base = OTHER; note = 2'-O-methyl modified nucleotide
  modified_base 96: mod_base = OTHER; note = 2'-O-methyl modified nucleotide
  modified_base 112: mod_base = OTHER; note = Nucleotide with phosphorothioate linkage
  modified_base 113: mod_base = OTHER; note = 2'-O-methyl modified nucleotide with phosphorothioate linkage
  modified_base 114: mod_base = OTHER; note = 2'-O-methyl modified nucleotide with phosphorothioate linkage
  modified_base 115: mod_base = OTHER; note = 2'-O-methyl modified nucleotide
gagaatcaaaatcggtgaatgttttagagctagaaatagcaagttaaaataaggctagtccgttatcaacttgaaaaagtggcaccgagtcggtgcgtctgtcattcaccgattt

SEQ ID NO: 16264 - RNA, 114 nt, synthetic construct
  source 1..114: mol_type = other RNA
  modified_base 1: mod_base = OTHER; note = 2'-O-methyl modified nucleotide with phosphorothioate linkage
  modified_base 2: mod_base = OTHER; note = 2'-O-methyl modified nucleotide with phosphorothioate linkage
  modified_base 3: mod_base = OTHER; note = 2'-O-methyl modified nucleotide with phosphorothioate linkage
  modified_base 29: mod_base = OTHER; note = 2'-O-methyl modified nucleotide
  modified_base 30: mod_base = OTHER; note = 2'-O-methyl modified nucleotide
  modified_base 31: mod_base = OTHER; note = 2'-O-methyl modified nucleotide
  modified_base 32: mod_base = OTHER; note = 2'-O-methyl modified nucleotide
  modified_base 33: mod_base = OTHER; note = 2'-O-methyl modified nucleotide
  modified_base 34: mod_base = OTHER; note = 2'-O-methyl modified nucleotide
  modified_base 35: mod_base = OTHER; note = 2'-O-methyl modified nucleotide
  modified_base 36: mod_base = OTHER; note = 2'-O-methyl modified nucleotide
  modified_base 37: mod_base = OTHER; note = 2'-O-methyl modified nucleotide
  modified_base 38: mod_base = OTHER; note = 2'-O-methyl modified nucleotide
  modified_base 39: mod_base = OTHER; note = 2'-O-methyl modified nucleotide
  modified_base 40: mod_base = OTHER; note = 2'-O-methyl modified nucleotide
  modified_base 69: mod_base = OTHER; note = 2'-O-methyl modified nucleotide
  modified_base 70: mod_base = OTHER; note = 2'-O-methyl modified nucleotide
  modified_base 71: mod_base = OTHER; note = 2'-O-methyl modified nucleotide
  modified_base 72: mod_base = OTHER; note = 2'-O-methyl modified nucleotide
  modified_base 73: mod_base = OTHER; note = 2'-O-methyl modified nucleotide
  modified_base 74: mod_base = OTHER; note = 2'-O-methyl modified nucleotide
  modified_base 75: mod_base = OTHER; note = 2'-O-methyl modified nucleotide
  modified_base 76: mod_base = OTHER; note = 2'-O-methyl modified nucleotide
  modified_base 77: mod_base = OTHER; note = 2'-O-methyl modified nucleotide
  modified_base 78: mod_base = OTHER; note = 2'-O-methyl modified nucleotide
  modified_base 79: mod_base = OTHER; note = 2'-O-methyl modified nucleotide
  modified_base 80: mod_base = OTHER; note = 2'-O-methyl modified nucleotide
  modified_base 81: mod_base = OTHER; note = 2'-O-methyl modified nucleotide
  modified_base 82: mod_base = OTHER; note = 2'-O-methyl modified nucleotide
  modified_base 83: mod_base = OTHER; note = 2'-O-methyl modified nucleotide
  modified_base 84: mod_base = OTHER; note = 2'-O-methyl modified nucleotide
  modified_base 85: mod_base = OTHER; note = 2'-O-methyl modified nucleotide
  modified_base 86: mod_base = OTHER; note = 2'-O-methyl modified nucleotide
  modified_base 87: mod_base = OTHER; note = 2'-O-methyl modified nucleotide
  modified_base 88: mod_base = OTHER; note = 2'-O-methyl modified nucleotide
  modified_base 89: mod_base = OTHER; note = 2'-O-methyl modified nucleotide
  modified_base 90: mod_base = OTHER; note = 2'-O-methyl modified nucleotide
  modified_base 91: mod_base = OTHER; note = 2'-O-methyl modified nucleotide
  modified_base 92: mod_base = OTHER; note = 2'-O-methyl modified nucleotide
  modified_base 93: mod_base = OTHER; note = 2'-O-methyl modified nucleotide
  modified_base 94: mod_base = OTHER; note = 2'-O-methyl modified nucleotide
  modified_base 95: mod_base = OTHER; note = 2'-O-methyl modified nucleotide
  modified_base 96: mod_base = OTHER; note = 2'-O-methyl modified nucleotide
  modified_base 111: mod_base = OTHER; note = Nucleotide with phosphorothioate linkage
  modified_base 112: mod_base = OTHER; note = 2'-O-methyl modified nucleotide with phosphorothioate linkage
  modified_base 113: mod_base = OTHER; note = 2'-O-methyl modified nucleotide with phosphorothioate linkage
  modified_base 114: mod_base = OTHER; note = 2'-O-methyl modified nucleotide
gagaatcaaaatcggtgaatgttttagagctagaaatagcaagttaaaataaggctagtccgttatcaacttgaaaaagtggcaccgagtcggtgcgtctgtcattcaccgatt

SEQ ID NO: 16265 - RNA, 121 nt, synthetic construct
  source 1..121: mol_type = other RNA
  modified_base 1: mod_base = OTHER; note = 2'-O-methyl modified nucleotide with phosphorothioate linkage
  modified_base 2: mod_base = OTHER; note = 2'-O-methyl modified nucleotide with phosphorothioate linkage
  modified_base 3: mod_base = OTHER; note = 2'-O-methyl modified nucleotide with phosphorothioate linkage
  modified_base 29: mod_base = OTHER; note = 2'-O-methyl modified nucleotide
  modified_base 30: mod_base = OTHER; note = 2'-O-methyl modified nucleotide
  modified_base 31: mod_base = OTHER; note = 2'-O-methyl modified nucleotide
  modified_base 32: mod_base = OTHER; note = 2'-O-methyl modified nucleotide
  modified_base 33: mod_base = OTHER; note = 2'-O-methyl modified nucleotide
  modified_base 34: mod_base = OTHER; note = 2'-O-methyl modified nucleotide
  modified_base 35: mod_base = OTHER; note = 2'-O-methyl modified nucleotide
  modified_base 36: mod_base = OTHER; note = 2'-O-methyl modified nucleotide
  modified_base 37: mod_base = OTHER; note = 2'-O-methyl modified nucleotide
  modified_base 38: mod_base = OTHER; note = 2'-O-methyl modified nucleotide
  modified_base 39: mod_base = OTHER; note = 2'-O-methyl modified nucleotide
  modified_base 40: mod_base = OTHER; note = 2'-O-methyl modified nucleotide
  modified_base 69: mod_base = OTHER; note = 2'-O-methyl modified nucleotide
  modified_base 70: mod_base = OTHER; note = 2'-O-methyl modified nucleotide
  modified_base 71: mod_base = OTHER; note = 2'-O-methyl modified nucleotide
  modified_base 72: mod_base = OTHER; note = 2'-O-methyl modified nucleotide
  modified_base 73: mod_base = OTHER; note = 2'-O-methyl modified nucleotide
  modified_base 74: mod_base = OTHER; note = 2'-O-methyl modified nucleotide
  modified_base 75: mod_base = OTHER; note = 2'-O-methyl modified nucleotide
  modified_base 76: mod_base = OTHER; note = 2'-O-methyl modified nucleotide
  modified_base 77: mod_base = OTHER; note = 2'-O-methyl modified nucleotide
  modified_base 78: mod_base = OTHER; note = 2'-O-methyl modified nucleotide
  modified_base 79: mod_base = OTHER; note = 2'-O-methyl modified nucleotide
  modified_base 80: mod_base = OTHER; note = 2'-O-methyl modified nucleotide
  modified_base 81: mod_base = OTHER; note = 2'-O-methyl modified nucleotide
  modified_base 82: mod_base = OTHER; note = 2'-O-methyl modified nucleotide
  modified_base 83: mod_base = OTHER; note = 2'-O-methyl modified nucleotide
  modified_base 84: mod_base = OTHER; note = 2'-O-methyl modified nucleotide
  modified_base 85: mod_base = OTHER; note = 2'-O-methyl modified nucleotide
  modified_base 86: mod_base = OTHER; note = 2'-O-methyl modified nucleotide
  modified_base 87: mod_base = OTHER; note = 2'-O-methyl modified nucleotide
  modified_base 88: mod_base = OTHER; note = 2'-O-methyl modified nucleotide
  modified_base 89: mod_base = OTHER; note = 2'-O-methyl modified nucleotide
  modified_base 90: mod_base = OTHER; note = 2'-O-methyl modified nucleotide
  modified_base 91: mod_base = OTHER; note = 2'-O-methyl modified nucleotide
  modified_base 92: mod_base = OTHER; note = 2'-O-methyl modified nucleotide
  modified_base 93: mod_base = OTHER; note = 2'-O-methyl modified nucleotide
  modified_base 94: mod_base = OTHER; note = 2'-O-methyl modified nucleotide
  modified_base 95: mod_base = OTHER; note = 2'-O-methyl modified nucleotide
  modified_base 96: mod_base = OTHER; note = 2'-O-methyl modified nucleotide
  modified_base 118: mod_base = OTHER; note = Nucleotide with phosphorothioate linkage
  modified_base 119: mod_base = OTHER; note = 2'-O-methyl modified nucleotide with phosphorothioate linkage
  modified_base 120: mod_base = OTHER; note = 2'-O-methyl modified nucleotide with phosphorothioate linkage
  modified_base 121: mod_base = OTHER; note = 2'-O-methyl modified nucleotide
gagaatcaaaatcggtgaatgttttagagctagaaatagcaagttaaaataaggctagtccgttatcaacttgaaaaagtggcaccgagtcggtgcaagtctgtcattcaccgattttgat

SEQ ID NO: 16266 - RNA, 120 nt, synthetic construct
  source 1..120: mol_type = other RNA
  modified_base 1: mod_base = OTHER; note = 2'-O-methyl modified nucleotide with phosphorothioate linkage
  modified_base 2: mod_base = OTHER; note = 2'-O-methyl modified nucleotide with phosphorothioate linkage
  modified_base 3: mod_base = OTHER; note = 2'-O-methyl modified nucleotide with phosphorothioate linkage
  modified_base 29: mod_base = OTHER; note = 2'-O-methyl modified nucleotide
  modified_base 30: mod_base = OTHER; note = 2'-O-methyl modified nucleotide
  modified_base 31: mod_base = OTHER; note = 2'-O-methyl modified nucleotide
  modified_base 32: mod_base = OTHER; note = 2'-O-methyl modified nucleotide
  modified_base 33: mod_base = OTHER; note = 2'-O-methyl modified nucleotide
  modified_base 34: mod_base = OTHER; note = 2'-O-methyl modified nucleotide
  modified_base 35: mod_base = OTHER; note = 2'-O-methyl modified nucleotide
  modified_base 36: mod_base = OTHER; note = 2'-O-methyl modified nucleotide
  modified_base 37: mod_base = OTHER; note = 2'-O-methyl modified nucleotide
  modified_base 38: mod_base = OTHER; note = 2'-O-methyl modified nucleotide
  modified_base 39: mod_base = OTHER; note = 2'-O-methyl modified nucleotide
  modified_base 40: mod_base = OTHER; note = 2'-O-methyl modified nucleotide
  modified_base 69: mod_base = OTHER; note = 2'-O-methyl modified nucleotide
  modified_base 70: mod_base = OTHER; note = 2'-O-methyl modified nucleotide
  modified_base 71: mod_base = OTHER; note = 2'-O-methyl modified nucleotide
  modified_base 72: mod_base = OTHER; note = 2'-O-methyl modified nucleotide
  modified_base 73: mod_base = OTHER; note = 2'-O-methyl modified nucleotide
  modified_base 74: mod_base = OTHER; note = 2'-O-methyl modified nucleotide
  modified_base 75: mod_base = OTHER; note = 2'-O-methyl modified nucleotide
  modified_base 76: mod_base = OTHER; note = 2'-O-methyl modified nucleotide
  modified_base 77: mod_base = OTHER; note = 2'-O-methyl modified nucleotide
  modified_base 78: mod_base = OTHER; note = 2'-O-methyl modified nucleotide
  modified_base 79: mod_base = OTHER; note = 2'-O-methyl modified nucleotide
  modified_base 80: mod_base = OTHER; note = 2'-O-methyl modified nucleotide
  modified_base 81: mod_base = OTHER; note = 2'-O-methyl modified nucleotide
  modified_base 82: mod_base = OTHER; note = 2'-O-methyl modified nucleotide
  modified_base 83: mod_base = OTHER; note = 2'-O-methyl modified nucleotide
  modified_base 84: mod_base = OTHER; note = 2'-O-methyl modified nucleotide
  modified_base 85: mod_base = OTHER; note = 2'-O-methyl modified nucleotide
  modified_base 86: mod_base = OTHER; note = 2'-O-methyl modified nucleotide
  modified_base 87: mod_base = OTHER; note = 2'-O-methyl modified nucleotide
  modified_base 88: mod_base = OTHER; note = 2'-O-methyl modified nucleotide
  modified_base 89: mod_base = OTHER; note = 2'-O-methyl modified nucleotide
  modified_base 90: mod_base = OTHER; note = 2'-O-methyl modified nucleotide
  modified_base 91: mod_base = OTHER; note = 2'-O-methyl modified nucleotide
  modified_base 92: mod_base = OTHER; note = 2'-O-methyl modified nucleotide
  modified_base 93: mod_base = OTHER; note = 2'-O-methyl modified nucleotide
  modified_base 94: mod_base = OTHER; note = 2'-O-methyl modified nucleotide
  modified_base 95: mod_base = OTHER; note = 2'-O-methyl modified nucleotide
  modified_base 96: mod_base = OTHER; note = 2'-O-methyl modified nucleotide
  modified_base 117: mod_base = OTHER; note = Nucleotide with phosphorothioate linkage
  modified_base 118: mod_base = OTHER; note = 2'-O-methyl modified nucleotide with phosphorothioate linkage
  modified_base 119: mod_base = OTHER; note = 2'-O-methyl modified nucleotide with phosphorothioate linkage
  modified_base 120: mod_base = OTHER; note = 2'-O-methyl modified nucleotide
gagaatcaaaatcggtgaatgttttagagctagaaatagcaagttaaaataaggctagtccgttatcaacttgaaaaagtggcaccgagtcggtgcaagtctgtcattcaccgattttga

SEQ ID NO: 16267 - RNA, 119 nt, synthetic construct
  source 1..119: mol_type = other RNA
  modified_base 1: mod_base = OTHER; note = 2'-O-methyl modified nucleotide with phosphorothioate linkage
  modified_base 2: mod_base = OTHER; note = 2'-O-methyl modified nucleotide with phosphorothioate linkage
  modified_base 3: mod_base = OTHER; note = 2'-O-methyl modified nucleotide with phosphorothioate linkage
  modified_base 29: mod_base = OTHER; note = 2'-O-methyl modified nucleotide
  modified_base 30: mod_base = OTHER; note = 2'-O-methyl modified nucleotide
  modified_base 31: mod_base = OTHER; note = 2'-O-methyl modified nucleotide
  modified_base 32: mod_base = OTHER; note = 2'-O-methyl modified nucleotide
  modified_base 33: mod_base = OTHER; note = 2'-O-methyl modified nucleotide
  modified_base 34: mod_base = OTHER; note = 2'-O-methyl modified nucleotide
  modified_base 35: mod_base = OTHER; note = 2'-O-methyl modified nucleotide
  modified_base 36: mod_base = OTHER; note = 2'-O-methyl modified nucleotide
  modified_base 37: mod_base = OTHER; note = 2'-O-methyl modified nucleotide
  modified_base 38: mod_base = OTHER; note = 2'-O-methyl modified nucleotide
  modified_base 39: mod_base = OTHER; note = 2'-O-methyl modified nucleotide
  modified_base 40: mod_base = OTHER; note = 2'-O-methyl modified nucleotide
  modified_base 69: mod_base = OTHER; note = 2'-O-methyl modified nucleotide
  modified_base 70: mod_base = OTHER; note = 2'-O-methyl modified nucleotide
  modified_base 71: mod_base = OTHER; note = 2'-O-methyl modified nucleotide
  modified_base 72: mod_base = OTHER; note = 2'-O-methyl modified nucleotide
  modified_base 73: mod_base = OTHER; note = 2'-O-methyl modified nucleotide
  modified_base 74: mod_base = OTHER; note = 2'-O-methyl modified nucleotide
  modified_base 75: mod_base = OTHER; note = 2'-O-methyl modified nucleotide
  modified_base 76: mod_base = OTHER; note = 2'-O-methyl modified nucleotide
  modified_base 77: mod_base = OTHER; note = 2'-O-methyl modified nucleotide
  modified_base 78: mod_base = OTHER; note = 2'-O-methyl modified nucleotide
  modified_base 79: mod_base = OTHER; note = 2'-O-methyl modified nucleotide
  modified_base 80: mod_base = OTHER; note = 2'-O-methyl modified nucleotide
  modified_base 81: mod_base = OTHER; note = 2'-O-methyl modified nucleotide
  modified_base 82: mod_base = OTHER; note = 2'-O-methyl modified nucleotide
  modified_base 83: mod_base = OTHER; note = 2'-O-methyl modified nucleotide
  modified_base 84: mod_base = OTHER; note = 2'-O-methyl modified nucleotide
  modified_base 85: mod_base = OTHER; note = 2'-O-methyl modified nucleotide
  modified_base 86: mod_base = OTHER; note = 2'-O-methyl modified nucleotide
  modified_base 87: mod_base = OTHER; note = 2'-O-methyl modified nucleotide
  modified_base 88: mod_base = OTHER; note = 2'-O-methyl modified nucleotide
  modified_base 89: mod_base = OTHER; note = 2'-O-methyl modified nucleotide
  modified_base 90: mod_base = OTHER; note = 2'-O-methyl modified nucleotide
  modified_base 91: mod_base = OTHER; note = 2'-O-methyl modified nucleotide
  modified_base 92: mod_base = OTHER; note = 2'-O-methyl modified nucleotide
  modified_base 93: mod_base = OTHER; note = 2'-O-methyl modified nucleotide
  modified_base 94: mod_base = OTHER; note = 2'-O-methyl modified nucleotide
  modified_base 95: mod_base = OTHER; note = 2'-O-methyl modified nucleotide
  modified_base 96: mod_base = OTHER; note = 2'-O-methyl modified nucleotide
  modified_base 116: mod_base = OTHER; note = Nucleotide with phosphorothioate linkage
  modified_base 117: mod_base = OTHER; note = 2'-O-methyl modified nucleotide with phosphorothioate linkage
  modified_base 118: mod_base = OTHER; note = 2'-O-methyl modified nucleotide with phosphorothioate linkage
  modified_base 119: mod_base = OTHER; note = 2'-O-methyl modified nucleotide
gagaatcaaaatcggtgaatgttttagagctagaaatagcaagttaaaataaggctagtccgttatcaacttgaaaaagtggcaccgagtcggtgcaagtctgtcattcaccgattttg

SEQ ID NO: 16268 - RNA, 118 nt, synthetic construct
  source 1..118: mol_type = other RNA
  modified_base 1: mod_base = OTHER; note = 2'-O-methyl modified nucleotide with phosphorothioate linkage
  modified_base 2: mod_base = OTHER; note = 2'-O-methyl modified nucleotide with phosphorothioate linkage
  modified_base 3: mod_base = OTHER; note = 2'-O-methyl modified nucleotide with phosphorothioate linkage
  modified_base 29: mod_base = OTHER; note = 2'-O-methyl modified nucleotide
  modified_base 30: mod_base = OTHER; note = 2'-O-methyl modified nucleotide
  modified_base 31: mod_base = OTHER; note = 2'-O-methyl modified nucleotide
  modified_base 32: mod_base = OTHER; note = 2'-O-methyl modified nucleotide
  modified_base 33: mod_base = OTHER; note = 2'-O-methyl modified nucleotide
  modified_base 34: mod_base = OTHER; note = 2'-O-methyl modified nucleotide
  modified_base 35: mod_base = OTHER; note = 2'-O-methyl modified nucleotide
  modified_base 36: mod_base = OTHER; note = 2'-O-methyl modified nucleotide
  modified_base 37: mod_base = OTHER; note = 2'-O-methyl modified nucleotide
  modified_base 38: mod_base = OTHER; note = 2'-O-methyl modified nucleotide
  modified_base 39: mod_base = OTHER; note = 2'-O-methyl modified nucleotide
  modified_base 40: mod_base = OTHER; note = 2'-O-methyl modified nucleotide
  modified_base 69: mod_base = OTHER; note = 2'-O-methyl modified nucleotide
  modified_base 70: mod_base = OTHER; note = 2'-O-methyl modified nucleotide
  modified_base 71: mod_base = OTHER; note = 2'-O-methyl modified nucleotide
  modified_base 72: mod_base = OTHER; note = 2'-O-methyl modified nucleotide
  modified_base 73: mod_base = OTHER; note = 2'-O-methyl modified nucleotide
  modified_base 74: mod_base = OTHER; note = 2'-O-methyl modified nucleotide
  modified_base 75: mod_base = OTHER; note = 2'-O-methyl modified nucleotide
  modified_base 76: mod_base = OTHER; note = 2'-O-methyl modified nucleotide
  modified_base 77: mod_base = OTHER; note = 2'-O-methyl modified nucleotide
  modified_base 78: mod_base = OTHER; note = 2'-O-methyl modified nucleotide
  modified_base 79: mod_base = OTHER; note = 2'-O-methyl modified nucleotide
  modified_base 80: mod_base = OTHER; note = 2'-O-methyl modified nucleotide
  modified_base 81: mod_base = OTHER; note = 2'-O-methyl modified nucleotide
  modified_base 82: mod_base = OTHER; note = 2'-O-methyl modified nucleotide
  modified_base 83: mod_base = OTHER; note = 2'-O-methyl modified nucleotide
  modified_base 84: mod_base = OTHER; note = 2'-O-methyl modified nucleotide
  modified_base 85: mod_base = OTHER; note = 2'-O-methyl modified nucleotide
  modified_base 86: mod_base = OTHER; note = 2'-O-methyl modified nucleotide
  modified_base 87: mod_base = OTHER; note = 2'-O-methyl modified nucleotide
  modified_base 88: mod_base = OTHER; note = 2'-O-methyl modified nucleotide
  modified_base 89: mod_base = OTHER; note = 2'-O-methyl modified nucleotide
  modified_base 90: mod_base = OTHER; note = 2'-O-methyl modified nucleotide
  modified_base 91: mod_base = OTHER; note = 2'-O-methyl modified nucleotide
  modified_base 92: mod_base = OTHER; note = 2'-O-methyl modified nucleotide
  modified_base 93: mod_base = OTHER; note = 2'-O-methyl modified nucleotide
  modified_base 94: mod_base = OTHER; note = 2'-O-methyl modified nucleotide
  modified_base 95: mod_base = OTHER; note = 2'-O-methyl modified nucleotide
  modified_base 96: mod_base = OTHER; note = 2'-O-methyl modified nucleotide
  modified_base 115: mod_base = OTHER; note = Nucleotide with phosphorothioate linkage
  modified_base 116: mod_base = OTHER; note = 2'-O-methyl modified nucleotide with phosphorothioate linkage
  modified_base 117: mod_base = OTHER; note = 2'-O-methyl modified nucleotide with phosphorothioate linkage
  modified_base 118: mod_base = OTHER; note = 2'-O-methyl modified nucleotide
gagaatcaaaatcggtgaatgttttagagctagaaatagcaagttaaaataaggctagtccgttatcaacttgaaaaagtggcaccgagtcggtgcaagtctgtcattcaccgatttt

SEQ ID NO: 16269 - RNA, 117 nt, synthetic construct
  source 1..117: mol_type = other RNA
  modified_base 1: mod_base = OTHER; note = 2'-O-methyl modified nucleotide with phosphorothioate linkage
  modified_base 2: mod_base = OTHER; note = 2'-O-methyl modified nucleotide with phosphorothioate linkage
  modified_base 3: mod_base = OTHER; note = 2'-O-methyl modified nucleotide with phosphorothioate linkage
  modified_base 29: mod_base = OTHER; note = 2'-O-methyl modified nucleotide
  modified_base 30: mod_base = OTHER; note = 2'-O-methyl modified nucleotide
  modified_base 31: mod_base = OTHER; note = 2'-O-methyl modified nucleotide
  modified_base 32: mod_base = OTHER; note = 2'-O-methyl modified nucleotide
  modified_base 33: mod_base = OTHER; note = 2'-O-methyl modified nucleotide
  modified_base 34: mod_base = OTHER; note = 2'-O-methyl modified nucleotide
  modified_base 35: mod_base = OTHER; note = 2'-O-methyl modified nucleotide
  modified_base 36: mod_base = OTHER; note = 2'-O-methyl modified nucleotide
  modified_base 37: mod_base = OTHER; note = 2'-O-methyl modified nucleotide
  modified_base 38: mod_base = OTHER; note = 2'-O-methyl modified nucleotide
  modified_base 39: mod_base = OTHER; note = 2'-O-methyl modified nucleotide
  modified_base 40: mod_base = OTHER; note = 2'-O-methyl modified nucleotide
  modified_base 69: mod_base = OTHER; note = 2'-O-methyl modified nucleotide
  modified_base 70: mod_base = OTHER; note = 2'-O-methyl modified nucleotide
  modified_base 71: mod_base = OTHER; note = 2'-O-methyl modified nucleotide
  modified_base 72: mod_base = OTHER; note = 2'-O-methyl modified nucleotide
  modified_base 73: mod_base = OTHER; note = 2'-O-methyl modified nucleotide
  modified_base 74: mod_base = OTHER; note = 2'-O-methyl modified nucleotide
  modified_base 75: mod_base = OTHER; note = 2'-O-methyl modified nucleotide
  modified_base 76: mod_base = OTHER; note = 2'-O-methyl modified nucleotide
  modified_base 77: mod_base = OTHER; note = 2'-O-methyl modified nucleotide
  modified_base 78: mod_base = OTHER; note = 2'-O-methyl modified nucleotide
  modified_base 79: mod_base = OTHER; note = 2'-O-methyl modified nucleotide
  modified_base 80: mod_base = OTHER; note = 2'-O-methyl modified nucleotide
  modified_base 81: mod_base = OTHER; note = 2'-O-methyl modified nucleotide
  modified_base 82: mod_base = OTHER; note = 2'-O-methyl modified nucleotide
  modified_base 83: mod_base = OTHER; note = 2'-O-methyl modified nucleotide
  modified_base 84: mod_base = OTHER; note = 2'-O-methyl modified nucleotide
  modified_base 85: mod_base = OTHER; note = 2'-O-methyl modified nucleotide
  modified_base 86: mod_base = OTHER; note = 2'-O-methyl modified nucleotide
  modified_base 87: mod_base = OTHER; note = 2'-O-methyl modified nucleotide
  modified_base 88: mod_base = OTHER; note = 2'-O-methyl modified nucleotide
  modified_base 89: mod_base = OTHER; note = 2'-O-methyl modified nucleotide
  modified_base 90: mod_base = OTHER; note = 2'-O-methyl modified nucleotide
  modified_base 91: mod_base = OTHER; note = 2'-O-methyl modified nucleotide
  modified_base 92: mod_base = OTHER; note = 2'-O-methyl modified nucleotide
  modified_base 93: mod_base = OTHER; note = 2'-O-methyl modified nucleotide
  modified_base 94: mod_base = OTHER; note = 2'-O-methyl modified nucleotide
  modified_base 95: mod_base = OTHER; note = 2'-O-methyl modified nucleotide
  modified_base 96: mod_base = OTHER; note = 2'-O-methyl modified nucleotide
  modified_base 114: mod_base = OTHER; note = Nucleotide with phosphorothioate linkage
  modified_base 115: mod_base = OTHER; note = 2'-O-methyl modified nucleotide with phosphorothioate linkage
  modified_base 116: mod_base = OTHER; note = 2'-O-methyl modified nucleotide with phosphorothioate linkage
  modified_base 117: mod_base = OTHER; note = 2'-O-methyl modified nucleotide
gagaatcaaaatcggtgaatgttttagagctagaaatagcaagttaaaataaggctagtccgttatcaacttgaaaaagtggcaccgagtcggtgcaagtctgtcattcaccgattt

SEQ ID NO: 16270 - RNA, 116 nt, synthetic construct
  source 1..116: mol_type = other RNA
  modified_base 1: mod_base = OTHER; note = 2'-O-methyl modified nucleotide with phosphorothioate linkage
  modified_base 2: mod_base = OTHER; note = 2'-O-methyl modified nucleotide with phosphorothioate linkage
  modified_base 3: mod_base = OTHER; note = 2'-O-methyl modified nucleotide with phosphorothioate linkage
  modified_base 29: mod_base = OTHER; note = 2'-O-methyl modified nucleotide
  modified_base 30: mod_base = OTHER; note = 2'-O-methyl modified nucleotide
  modified_base 31: mod_base = OTHER; note = 2'-O-methyl modified nucleotide
  modified_base 32: mod_base = OTHER; note = 2'-O-methyl modified nucleotide
  modified_base 33: mod_base = OTHER; note = 2'-O-methyl modified nucleotide
  modified_base 34: mod_base = OTHER; note = 2'-O-methyl modified nucleotide
  modified_base 35: mod_base = OTHER; note = 2'-O-methyl modified nucleotide
  modified_base 36: mod_base = OTHER; note = 2'-O-methyl modified nucleotide
  modified_base 37: mod_base = OTHER; note = 2'-O-methyl modified nucleotide
  modified_base 38: mod_base = OTHER; note = 2'-O-methyl modified nucleotide
  modified_base 39: mod_base = OTHER; note = 2'-O-methyl modified nucleotide
  modified_base 40: mod_base = OTHER; note = 2'-O-methyl modified nucleotide
  modified_base 69: mod_base = OTHER; note = 2'-O-methyl modified nucleotide
  modified_base 70: mod_base = OTHER; note = 2'-O-methyl modified nucleotide
  modified_base 71: mod_base = OTHER; note = 2'-O-methyl modified nucleotide
  modified_base 72: mod_base = OTHER; note = 2'-O-methyl modified nucleotide
  modified_base 73: mod_base = OTHER; note = 2'-O-methyl modified nucleotide
  modified_base 74: mod_base = OTHER; note = 2'-O-methyl modified nucleotide
  modified_base 75: mod_base = OTHER; note = 2'-O-methyl modified nucleotide
  modified_base 76: mod_base = OTHER; note = 2'-O-methyl modified nucleotide
  modified_base 77: mod_base = OTHER; note = 2'-O-methyl modified nucleotide
  modified_base 78: mod_base = OTHER; note = 2'-O-methyl modified nucleotide
  modified_base 79: mod_base = OTHER; note = 2'-O-methyl modified nucleotide
  modified_base 80: mod_base = OTHER; note = 2'-O-methyl modified nucleotide
  modified_base 81: mod_base = OTHER; note = 2'-O-methyl modified nucleotide
  modified_base 82: mod_base = OTHER; note = 2'-O-methyl modified nucleotide
  modified_base 83: mod_base = OTHER; note = 2'-O-methyl modified nucleotide
  modified_base 84: mod_base = OTHER; note = 2'-O-methyl modified nucleotide
  modified_base 85: mod_base = OTHER; note = 2'-O-methyl modified nucleotide
  modified_base 86: mod_base = OTHER; note = 2'-O-methyl modified nucleotide
  modified_base 87: mod_base = OTHER; note = 2'-O-methyl modified nucleotide
  modified_base 88: mod_base = OTHER; note = 2'-O-methyl modified nucleotide
  modified_base 89: mod_base = OTHER; note = 2'-O-methyl modified nucleotide
  modified_base 90: mod_base = OTHER; note = 2'-O-methyl modified nucleotide
  modified_base 91: mod_base = OTHER; note = 2'-O-methyl modified nucleotide
  modified_base 92: mod_base = OTHER; note = 2'-O-methyl modified nucleotide
  modified_base 93: mod_base = OTHER; note = 2'-O-methyl modified nucleotide
  modified_base 94: mod_base = OTHER; note = 2'-O-methyl modified nucleotide
  modified_base 95: mod_base = OTHER; note = 2'-O-methyl modified nucleotide
  modified_base 96: mod_base = OTHER; note = 2'-O-methyl modified nucleotide
  modified_base 113: mod_base = OTHER; note = Nucleotide with phosphorothioate linkage
  modified_base 114: mod_base = OTHER; note = 2'-O-methyl modified nucleotide with phosphorothioate linkage
  modified_base 115: mod_base = OTHER; note = 2'-O-methyl modified nucleotide with phosphorothioate linkage
  modified_base 116: mod_base = OTHER; note = 2'-O-methyl modified nucleotide
gagaatcaaaatcggtgaatgttttagagctagaaatagcaagttaaaataaggctagtccgttatcaacttgaaaaagtggcaccgagtcggtgcaagtctgtcattcaccgatt

SEQ ID NO: 16271 - RNA, 123 nt, synthetic construct
  source 1..123: mol_type = other RNA
  modified_base 1: mod_base = OTHER; note = 2'-O-methyl modified nucleotide with phosphorothioate linkage
  modified_base 2: mod_base = OTHER; note = 2'-O-methyl modified nucleotide with phosphorothioate linkage
  modified_base 3: mod_base = OTHER; note = 2'-O-methyl modified nucleotide with phosphorothioate linkage
  modified_base 29: mod_base = OTHER; note = 2'-O-methyl modified nucleotide
  modified_base 30: mod_base = OTHER; note = 2'-O-methyl modified nucleotide
  modified_base 31: mod_base = OTHER; note = 2'-O-methyl modified nucleotide
  modified_base 32: mod_base = OTHER; note = 2'-O-methyl modified nucleotide
  modified_base 33: mod_base = OTHER; note = 2'-O-methyl modified nucleotide
  modified_base 34: mod_base = OTHER; note = 2'-O-methyl modified nucleotide
  modified_base 35: mod_base = OTHER; note = 2'-O-methyl modified nucleotide
  modified_base 36: mod_base = OTHER; note = 2'-O-methyl modified nucleotide
  modified_base 37: mod_base = OTHER; note = 2'-O-methyl modified nucleotide
  modified_base 38: mod_base = OTHER; note = 2'-O-methyl modified nucleotide
  modified_base 39: mod_base = OTHER; note = 2'-O-methyl modified nucleotide
  modified_base 40: mod_base = OTHER; note = 2'-O-methyl modified nucleotide
  modified_base 69: mod_base = OTHER; note = 2'-O-methyl modified nucleotide
  modified_base 70: mod_base = OTHER; note = 2'-O-methyl modified nucleotide
  modified_base 71: mod_base = OTHER; note = 2'-O-methyl modified nucleotide
  modified_base 72: mod_base = OTHER; note = 2'-O-methyl modified nucleotide
  modified_base 73: mod_base = OTHER; note = 2'-O-methyl modified nucleotide
  modified_base 74: mod_base = OTHER; note = 2'-O-methyl modified nucleotide
  modified_base 75: mod_base = OTHER; note = 2'-O-methyl modified nucleotide
  modified_base 76: mod_base = OTHER; note = 2'-O-methyl modified nucleotide
  modified_base 77: mod_base = OTHER; note = 2'-O-methyl modified nucleotide
  modified_base 78: mod_base = OTHER; note = 2'-O-methyl modified nucleotide
  modified_base 79: mod_base = OTHER; note = 2'-O-methyl modified nucleotide
  modified_base 80: mod_base = OTHER; note = 2'-O-methyl modified nucleotide
  modified_base 81: mod_base = OTHER; note = 2'-O-methyl modified nucleotide
  modified_base 82: mod_base = OTHER; note = 2'-O-methyl modified nucleotide
  modified_base 83: mod_base = OTHER; note = 2'-O-methyl modified nucleotide
  modified_base 84: mod_base = OTHER; note = 2'-O-methyl modified nucleotide
  modified_base 85: mod_base = OTHER; note = 2'-O-methyl modified nucleotide
  modified_base 86: mod_base = OTHER; note = 2'-O-methyl modified nucleotide
  modified_base 87: mod_base = OTHER; note = 2'-O-methyl modified nucleotide
  modified_base 88: mod_base = OTHER; note = 2'-O-methyl modified nucleotide
  modified_base 89: mod_base = OTHER; note = 2'-O-methyl modified nucleotide
  modified_base 90: mod_base = OTHER; note = 2'-O-methyl modified nucleotide
  modified_base 91: mod_base = OTHER; note = 2'-O-methyl modified nucleotide
  modified_base 92: mod_base = OTHER; note = 2'-O-methyl modified nucleotide
  modified_base 93: mod_base = OTHER; note = 2'-O-methyl modified nucleotide
  modified_base 94: mod_base = OTHER; note = 2'-O-methyl modified nucleotide
  modified_base 95: mod_base = OTHER; note = 2'-O-methyl modified nucleotide
  modified_base 96: mod_base = OTHER; note = 2'-O-methyl modified nucleotide
  modified_base 120: mod_base = OTHER; note = Nucleotide with phosphorothioate linkage
  modified_base 121: mod_base = OTHER; note = 2'-O-methyl modified nucleotide with phosphorothioate linkage
  modified_base 122: mod_base = OTHER; note = 2'-O-methyl modified nucleotide with phosphorothioate linkage
  modified_base 123: mod_base = OTHER; note = 2'-O-methyl modified nucleotide
gagaatcaaaatcggtgaatgttttagagctagaaatagcaagttaaaataaggctagtccgttatcaacttgaaaaagtggcaccgagtcggtgcacaagtctgtcattcaccgattttgat

SEQ ID NO: 16272 - RNA, 122 nt, synthetic construct
  source 1..122: mol_type = other RNA
  modified_base 1: mod_base = OTHER; note = 2'-O-methyl modified nucleotide with phosphorothioate linkage
  modified_base 2: mod_base = OTHER; note = 2'-O-methyl modified nucleotide with phosphorothioate linkage
  modified_base 3: mod_base = OTHER; note = 2'-O-methyl modified nucleotide with phosphorothioate linkage
  modified_base 29: mod_base = OTHER; note = 2'-O-methyl modified nucleotide
  modified_base 30: mod_base = OTHER; note = 2'-O-methyl modified nucleotide
  modified_base 31: mod_base = OTHER; note = 2'-O-methyl modified nucleotide
  modified_base 32: mod_base = OTHER; note = 2'-O-methyl modified nucleotide
  modified_base 33: mod_base = OTHER; note = 2'-O-methyl modified nucleotide
  modified_base 34: mod_base = OTHER; note = 2'-O-methyl modified nucleotide
  modified_base 35: mod_base = OTHER; note = 2'-O-methyl modified nucleotide
  modified_base 36: mod_base = OTHER; note = 2'-O-methyl modified nucleotide
  modified_base 37: mod_base = OTHER; note = 2'-O-methyl modified nucleotide
  modified_base 38: mod_base = OTHER; note = 2'-O-methyl modified nucleotide
  modified_base 39: mod_base = OTHER; note = 2'-O-methyl modified nucleotide
  modified_base 40: mod_base = OTHER; note = 2'-O-methyl modified nucleotide
  modified_base 69: mod_base = OTHER; note = 2'-O-methyl modified nucleotide
  modified_base 70: mod_base = OTHER; note = 2'-O-methyl modified nucleotide
  modified_base 71: mod_base = OTHER; note = 2'-O-methyl modified nucleotide
  modified_base 72: mod_base = OTHER; note = 2'-O-methyl modified nucleotide
  modified_base 73: mod_base = OTHER; note = 2'-O-methyl modified nucleotide
  modified_base 74: mod_base = OTHER; note = 2'-O-methyl modified nucleotide
  modified_base 75: mod_base = OTHER; note = 2'-O-methyl modified nucleotide
  modified_base 76: mod_base = OTHER; note = 2'-O-methyl modified nucleotide
  modified_base 77: mod_base = OTHER; note = 2'-O-methyl modified nucleotide
  modified_base 78: mod_base = OTHER; note = 2'-O-methyl modified nucleotide
  modified_base 79: mod_base = OTHER; note = 2'-O-methyl modified nucleotide
  modified_base 80: mod_base = OTHER; note = 2'-O-methyl modified nucleotide
  modified_base 81: mod_base = OTHER; note = 2'-O-methyl modified nucleotide
  modified_base 82: mod_base = OTHER; note = 2'-O-methyl modified nucleotide
  modified_base 83: mod_base = OTHER; note = 2'-O-methyl modified nucleotide
  modified_base 84: mod_base = OTHER; note = 2'-O-methyl modified nucleotide
  modified_base 85: mod_base = OTHER; note = 2'-O-methyl modified nucleotide
  modified_base 86: mod_base = OTHER; note = 2'-O-methyl modified nucleotide
  modified_base 87: mod_base = OTHER; note = 2'-O-methyl modified nucleotide
  modified_base 88: mod_base = OTHER; note = 2'-O-methyl modified nucleotide
  modified_base 89: mod_base = OTHER; note = 2'-O-methyl modified nucleotide
  modified_base 90: mod_base = OTHER; note = 2'-O-methyl modified nucleotide
  modified_base 91: mod_base = OTHER; note = 2'-O-methyl modified nucleotide
  modified_base 92: mod_base = OTHER; note = 2'-O-methyl modified nucleotide
  modified_base 93: mod_base = OTHER; note = 2'-O-methyl modified nucleotide
  modified_base 94: mod_base = OTHER; note = 2'-O-methyl modified nucleotide
  modified_base 95: mod_base = OTHER; note = 2'-O-methyl modified nucleotide
  modified_base 96: mod_base = OTHER; note = 2'-O-methyl modified nucleotide
  modified_base 119: mod_base = OTHER; note = Nucleotide with phosphorothioate linkage
  modified_base 120: mod_base = OTHER; note = 2'-O-methyl modified nucleotide with phosphorothioate linkage
  modified_base 121: mod_base = OTHER; note = 2'-O-methyl modified nucleotide with phosphorothioate linkage
  modified_base 122: mod_base = OTHER; note = 2'-O-methyl modified nucleotide
gagaatcaaaatcggtgaatgttttagagctagaaatagcaagttaaaataaggctagtccgttatcaacttgaaaaagtggcaccgagtcggtgcacaagtctgtcattcaccgattttga

SEQ ID NO: 16273 - RNA, 121 nt, synthetic construct
  source 1..121: mol_type = other RNA
  modified_base 1: mod_base = OTHER; note = 2'-O-methyl modified nucleotide with phosphorothioate linkage
  modified_base 2: mod_base = OTHER; note = 2'-O-methyl modified nucleotide with phosphorothioate linkage
  modified_base 3: mod_base = OTHER; note = 2'-O-methyl modified nucleotide with phosphorothioate linkage
  modified_base 29: mod_base = OTHER; note = 2'-O-methyl modified nucleotide
  modified_base 30: mod_base = OTHER; note = 2'-O-methyl modified nucleotide
  modified_base 31: mod_base = OTHER; note = 2'-O-methyl modified nucleotide
  modified_base 32: mod_base = OTHER; note = 2'-O-methyl modified nucleotide
  modified_base 33: mod_base = OTHER; note = 2'-O-methyl modified nucleotide
  modified_base 34: mod_base = OTHER; note = 2'-O-methyl modified nucleotide
  modified_base 35: mod_base = OTHER; note = 2'-O-methyl modified nucleotide
  modified_base 36: mod_base = OTHER; note = 2'-O-methyl modified nucleotide
  modified_base 37: mod_base = OTHER; note = 2'-O-methyl modified nucleotide
  modified_base 38: mod_base = OTHER; note = 2'-O-methyl modified nucleotide
  modified_base 39: mod_base = OTHER; note = 2'-O-methyl modified nucleotide
  modified_base 40: mod_base = OTHER; note = 2'-O-methyl modified nucleotide
  modified_base 69: mod_base = OTHER; note = 2'-O-methyl modified nucleotide
  modified_base 70: mod_base = OTHER; note = 2'-O-methyl modified nucleotide
  modified_base 71: mod_base = OTHER; note = 2'-O-methyl modified nucleotide
  modified_base 72: mod_base = OTHER; note = 2'-O-methyl modified nucleotide
  modified_base 73: mod_base = OTHER; note = 2'-O-methyl modified nucleotide
  modified_base 74: mod_base = OTHER; note = 2'-O-methyl modified nucleotide
  modified_base 75: mod_base = OTHER; note = 2'-O-methyl modified nucleotide
  modified_base 76: mod_base = OTHER; note = 2'-O-methyl modified nucleotide
  modified_base 77: mod_base = OTHER; note = 2'-O-methyl modified nucleotide
  modified_base 78: mod_base = OTHER; note = 2'-O-methyl modified nucleotide
  modified_base 79: mod_base = OTHER; note = 2'-O-methyl modified nucleotide
  modified_base 80: mod_base = OTHER; note = 2'-O-methyl modified nucleotide
  modified_base 81: mod_base = OTHER; note = 2'-O-methyl modified nucleotide
  modified_base 82: mod_base = OTHER; note = 2'-O-methyl modified nucleotide
  modified_base 83: mod_base = OTHER; note = 2'-O-methyl modified nucleotide
  modified_base 84: mod_base = OTHER; note = 2'-O-methyl modified nucleotide
  modified_base 85: mod_base = OTHER; note = 2'-O-methyl modified nucleotide
  modified_base 86: mod_base = OTHER; note = 2'-O-methyl modified nucleotide
  modified_base 87: mod_base = OTHER; note = 2'-O-methyl modified nucleotide
  modified_base 88: mod_base = OTHER; note = 2'-O-methyl modified nucleotide
  modified_base 89: mod_base = OTHER; note = 2'-O-methyl modified nucleotide
  modified_base 90: mod_base = OTHER; note = 2'-O-methyl modified nucleotide
  modified_base 91: mod_base = OTHER; note = 2'-O-methyl modified nucleotide
  modified_base 92: mod_base = OTHER; note = 2'-O-methyl modified nucleotide
  modified_base 93: mod_base = OTHER; note = 2'-O-methyl modified nucleotide
  modified_base 94: mod_base = OTHER; note = 2'-O-methyl modified nucleotide
  modified_base 95: mod_base = OTHER; note = 2'-O-methyl modified nucleotide
  modified_base 96: mod_base = OTHER; note = 2'-O-methyl modified nucleotide
  modified_base 118: mod_base = OTHER; note = Nucleotide with phosphorothioate linkage
  modified_base 119: mod_base = OTHER; note = 2'-O-methyl modified nucleotide with phosphorothioate linkage
  modified_base 120: mod_base = OTHER; note = 2'-O-methyl modified nucleotide with phosphorothioate linkage
  modified_base 121: mod_base = OTHER; note = 2'-O-methyl modified nucleotide
gagaatcaaaatcggtgaatgttttagagctagaaatagcaagttaaaataaggctagtccgttatcaacttgaaaaagtggcaccgagtcggtgcacaagtctgtcattcaccgattttg

SEQ ID NO: 16274 - RNA, 120 nt, synthetic construct
  source 1..120: mol_type = other RNA
  modified_base 1: mod_base = OTHER; note = 2'-O-methyl modified nucleotide with phosphorothioate linkage
  modified_base 2: mod_base = OTHER; note = 2'-O-methyl modified nucleotide with phosphorothioate linkage
  modified_base 3: mod_base = OTHER; note = 2'-O-methyl modified nucleotide with phosphorothioate linkage
  modified_base 29: mod_base = OTHER; note = 2'-O-methyl modified nucleotide
  modified_base 30: mod_base = OTHER; note = 2'-O-methyl modified nucleotide
  modified_base 31: mod_base = OTHER; note = 2'-O-methyl modified nucleotide
  modified_base 32: mod_base = OTHER; note = 2'-O-methyl modified nucleotide
  modified_base 33: mod_base = OTHER; note = 2'-O-methyl modified nucleotide
  modified_base 34: mod_base = OTHER; note = 2'-O-methyl modified nucleotide
  modified_base 35: mod_base = OTHER; note = 2'-O-methyl modified nucleotide
  modified_base 36: mod_base = OTHER; note = 2'-O-methyl modified nucleotide
  modified_base 37: mod_base = OTHER; note = 2'-O-methyl modified nucleotide
  modified_base 38: mod_base = OTHER; note = 2'-O-methyl modified nucleotide
  modified_base 39: mod_base = OTHER; note = 2'-O-methyl modified nucleotide
  modified_base 40: mod_base = OTHER; note = 2'-O-methyl modified nucleotide
  modified_base 69: mod_base = OTHER; note = 2'-O-methyl modified nucleotide
  modified_base 70: mod_base = OTHER; note = 2'-O-methyl modified nucleotide
  modified_base 71: mod_base = OTHER; note = 2'-O-methyl modified nucleotide
  modified_base 72: mod_base = OTHER; note = 2'-O-methyl modified nucleotide
  modified_base 73: mod_base = OTHER; note = 2'-O-methyl modified nucleotide
  modified_base 74: mod_base = OTHER; note = 2'-O-methyl modified nucleotide
  modified_base 75: mod_base = OTHER; note = 2'-O-methyl modified nucleotide
  modified_base 76: mod_base = OTHER; note = 2'-O-methyl modified nucleotide
  modified_base 77: mod_base = OTHER; note = 2'-O-methyl modified nucleotide
  modified_base 78: mod_base = OTHER; note = 2'-O-methyl modified nucleotide
  modified_base 79: mod_base = OTHER; note = 2'-O-methyl modified nucleotide
  modified_base 80: mod_base = OTHER; note = 2'-O-methyl modified nucleotide
  modified_base 81: mod_base = OTHER; note = 2'-O-methyl modified nucleotide
  modified_base 82: mod_base = OTHER; note = 2'-O-methyl modified nucleotide
  modified_base 83: mod_base = OTHER; note = 2'-O-methyl modified nucleotide
  modified_base 84: mod_base = OTHER; note = 2'-O-methyl modified nucleotide
  modified_base 85: mod_base = OTHER; note = 2'-O-methyl modified nucleotide
  modified_base 86: mod_base = OTHER; note = 2'-O-methyl modified nucleotide
  modified_base 87: mod_base = OTHER; note = 2'-O-methyl modified nucleotide
  modified_base 88: mod_base = OTHER; note = 2'-O-methyl modified nucleotide
  modified_base 89: mod_base = OTHER; note = 2'-O-methyl modified nucleotide
  modified_base 90: mod_base = OTHER; note = 2'-O-methyl modified nucleotide
  modified_base 91: mod_base = OTHER; note = 2'-O-methyl modified nucleotide
  modified_base 92: mod_base = OTHER; note = 2'-O-methyl modified nucleotide
  modified_base 93: mod_base = OTHER; note = 2'-O-methyl modified nucleotide
  modified_base 94: mod_base = OTHER; note = 2'-O-methyl modified nucleotide
  modified_base 95: mod_base = OTHER; note = 2'-O-methyl modified nucleotide
  modified_base 96: mod_base = OTHER; note = 2'-O-methyl modified nucleotide
  modified_base 117: mod_base = OTHER; note = Nucleotide with phosphorothioate linkage
  modified_base 118: mod_base = OTHER; note = 2'-O-methyl modified nucleotide with phosphorothioate linkage
  modified_base 119: mod_base = OTHER; note = 2'-O-methyl modified nucleotide with phosphorothioate linkage
  modified_base 120: mod_base = OTHER; note = 2'-O-methyl modified nucleotide
gagaatcaaaatcggtgaatgttttagagctagaaatagcaagttaaaataaggctagtccgttatcaacttgaaaaagtggcaccgagtcggtgcacaagtctgtcattcaccgatttt

SEQ ID NO: 16275 - RNA, 119 nt, synthetic construct
  source 1..119: mol_type = other RNA
  modified_base 1: mod_base = OTHER; note = 2'-O-methyl modified nucleotide with phosphorothioate linkage
  modified_base 2: mod_base = OTHER; note = 2'-O-methyl modified nucleotide with phosphorothioate linkage
  modified_base 3: mod_base = OTHER; note = 2'-O-methyl modified nucleotide with phosphorothioate linkage
  modified_base 29: mod_base = OTHER; note = 2'-O-methyl modified nucleotide
  modified_base 30: mod_base = OTHER; note = 2'-O-methyl modified nucleotide
  modified_base 31: mod_base = OTHER; note = 2'-O-methyl modified nucleotide
  modified_base 32: mod_base = OTHER; note = 2'-O-methyl modified nucleotide
  modified_base 33: mod_base = OTHER; note = 2'-O-methyl modified nucleotide
  modified_base 34: mod_base = OTHER; note = 2'-O-methyl modified nucleotide
  modified_base 35: mod_base = OTHER; note = 2'-O-methyl modified nucleotide
  modified_base 36: mod_base = OTHER; note = 2'-O-methyl modified nucleotide
  modified_base 37: mod_base = OTHER; note = 2'-O-methyl modified nucleotide
  modified_base 38: mod_base = OTHER; note = 2'-O-methyl modified nucleotide
  modified_base 39: mod_base = OTHER; note = 2'-O-methyl modified nucleotide
  modified_base 40: mod_base = OTHER; note = 2'-O-methyl modified nucleotide
  modified_base 69: mod_base = OTHER; note = 2'-O-methyl modified nucleotide
  modified_base 70: mod_base = OTHER; note = 2'-O-methyl modified nucleotide
  modified_base 71: mod_base = OTHER; note = 2'-O-methyl modified nucleotide
  modified_base 72: mod_base = OTHER; note = 2'-O-methyl modified nucleotide
  modified_base 73: mod_base = OTHER; note = 2'-O-methyl modified nucleotide
  modified_base 74: mod_base = OTHER; note = 2'-O-methyl modified nucleotide
  modified_base 75: mod_base = OTHER; note = 2'-O-methyl modified nucleotide
  modified_base 76: mod_base = OTHER; note = 2'-O-methyl modified nucleotide
  modified_base 77: mod_base = OTHER; note = 2'-O-methyl modified nucleotide
  modified_base 78: mod_base = OTHER; note = 2'-O-methyl modified nucleotide
  modified_base 79: mod_base = OTHER; note = 2'-O-methyl modified nucleotide
  modified_base 80: mod_base = OTHER; note = 2'-O-methyl modified nucleotide
  modified_base 81: mod_base = OTHER; note = 2'-O-methyl modified nucleotide
  modified_base 82: mod_base = OTHER; note = 2'-O-methyl modified nucleotide
  modified_base 83: mod_base = OTHER; note = 2'-O-methyl modified nucleotide
  modified_base 84: mod_base = OTHER; note = 2'-O-methyl modified nucleotide
  modified_base 85: mod_base = OTHER; note = 2'-O-methyl modified nucleotide
  modified_base 86: mod_base = OTHER; note = 2'-O-methyl modified nucleotide
  modified_base 87: mod_base = OTHER; note = 2'-O-methyl modified nucleotide
  modified_base 88: mod_base = OTHER; note = 2'-O-methyl modified nucleotide
  modified_base 89: mod_base = OTHER; note = 2'-O-methyl modified nucleotide
  modified_base 90: mod_base = OTHER; note = 2'-O-methyl modified nucleotide
  modified_base 91: mod_base = OTHER; note = 2'-O-methyl modified nucleotide
  modified_base 92: mod_base = OTHER; note = 2'-O-methyl modified nucleotide
  modified_base 93: mod_base = OTHER; note = 2'-O-methyl modified nucleotide
  modified_base 94: mod_base = OTHER; note = 2'-O-methyl modified nucleotide
  modified_base 95: mod_base = OTHER; note = 2'-O-methyl modified nucleotide
  modified_base 96: mod_base = OTHER; note = 2'-O-methyl modified nucleotide
  modified_base 116: mod_base = OTHER; note = Nucleotide with phosphorothioate linkage
  modified_base 117: mod_base = OTHER; note = 2'-O-methyl modified nucleotide with phosphorothioate linkage
  modified_base 118: mod_base = OTHER; note = 2'-O-methyl modified nucleotide with phosphorothioate linkage
  modified_base 119: mod_base = OTHER; note = 2'-O-methyl modified nucleotide
gagaatcaaaatcggtgaatgttttagagctagaaatagcaagttaaaataaggctagtccgttatcaacttgaaaaagtggcaccgagtcggtgcacaagtctgtcattcaccgattt

SEQ ID NO: 16276 - RNA, 118 nt, synthetic construct
  source 1..118: mol_type = other RNA
  modified_base 1: mod_base = OTHER; note = 2'-O-methyl modified nucleotide with phosphorothioate linkage
  modified_base 2: mod_base = OTHER; note = 2'-O-methyl modified nucleotide with phosphorothioate linkage
  modified_base 3: mod_base = OTHER; note = 2'-O-methyl modified nucleotide with phosphorothioate linkage
  modified_base 29: mod_base = OTHER; note = 2'-O-methyl modified nucleotide
  modified_base 30: mod_base = OTHER; note = 2'-O-methyl modified nucleotide
  modified_base 31: mod_base = OTHER; note = 2'-O-methyl modified nucleotide
  modified_base 32: mod_base = OTHER; note = 2'-O-methyl modified nucleotide
  modified_base 33: mod_base = OTHER; note = 2'-O-methyl modified nucleotide
  modified_base 34: mod_base = OTHER; note = 2'-O-methyl modified nucleotide
  modified_base 35: mod_base = OTHER; note = 2'-O-methyl modified nucleotide
  modified_base 36: mod_base = OTHER; note = 2'-O-methyl modified nucleotide
  modified_base 37: mod_base = OTHER; note = 2'-O-methyl modified nucleotide
  modified_base 38: mod_base = OTHER; note = 2'-O-methyl modified nucleotide
  modified_base 39: mod_base = OTHER; note = 2'-O-methyl modified nucleotide
  modified_base 40: mod_base = OTHER; note = 2'-O-methyl modified nucleotide
  modified_base 69: mod_base = OTHER; note = 2'-O-methyl modified nucleotide
  modified_base 70: mod_base = OTHER; note = 2'-O-methyl modified nucleotide
  modified_base 71: mod_base = OTHER; note = 2'-O-methyl modified nucleotide
  modified_base 72: mod_base = OTHER; note = 2'-O-methyl modified nucleotide
  modified_base 73: mod_base = OTHER; note = 2'-O-methyl modified nucleotide
  modified_base 74: mod_base = OTHER; note = 2'-O-methyl modified nucleotide
  modified_base 75: mod_base = OTHER; note = 2'-O-methyl modified nucleotide
  modified_base 76: mod_base = OTHER; note = 2'-O-methyl modified nucleotide
  modified_base 77: mod_base = OTHER; note = 2'-O-methyl modified nucleotide
  modified_base 78: mod_base = OTHER; note = 2'-O-methyl modified nucleotide
  modified_base 79: mod_base = OTHER; note = 2'-O-methyl modified nucleotide
  modified_base 80: mod_base = OTHER; note = 2'-O-methyl modified nucleotide
  modified_base 81: mod_base = OTHER; note = 2'-O-methyl modified nucleotide
  modified_base 82: mod_base = OTHER; note = 2'-O-methyl modified nucleotide
  modified_base 83: mod_base = OTHER; note = 2'-O-methyl modified nucleotide
  modified_base 84: mod_base = OTHER; note = 2'-O-methyl modified nucleotide
  modified_base 85: mod_base = OTHER; note = 2'-O-methyl modified nucleotide
  modified_base 86: mod_base = OTHER; note = 2'-O-methyl modified nucleotide
  modified_base 87: mod_base = OTHER; note = 2'-O-methyl modified nucleotide
  modified_base 88: mod_base = OTHER; note = 2'-O-methyl modified nucleotide
  modified_base 89: mod_base = OTHER; note = 2'-O-methyl modified nucleotide
  modified_base 90: mod_base = OTHER; note = 2'-O-methyl modified nucleotide
  modified_base 91: mod_base = OTHER; note = 2'-O-methyl modified nucleotide
  modified_base 92: mod_base = OTHER; note = 2'-O-methyl modified nucleotide
  modified_base 93: mod_base = OTHER; note = 2'-O-methyl modified nucleotide
  modified_base 94: mod_base = OTHER; note = 2'-O-methyl modified nucleotide
  modified_base 95: mod_base = OTHER; note = 2'-O-methyl modified nucleotide
  modified_base 96: mod_base = OTHER; note = 2'-O-methyl modified nucleotide
  modified_base 115: mod_base = OTHER; note = Nucleotide with phosphorothioate linkage
  modified_base 116: mod_base = OTHER; note = 2'-O-methyl modified nucleotide with phosphorothioate linkage
  modified_base 117: mod_base = OTHER; note = 2'-O-methyl modified nucleotide with phosphorothioate linkage
  modified_base 118: mod_base = OTHER; note = 2'-O-methyl modified nucleotide
gagaatcaaaatcggtgaatgttttagagctagaaatagcaagttaaaataaggctagtccgttatcaacttgaaaaagtggcaccgagtcggtgcacaagtctgtcattcaccgatt

SEQ ID NO: 16277 - RNA, 125 nt, synthetic construct
  source 1..125: mol_type = other RNA
  modified_base 1: mod_base = OTHER; note = 2'-O-methyl modified nucleotide with phosphorothioate linkage
  modified_base 2: mod_base = OTHER; note = 2'-O-methyl modified nucleotide with phosphorothioate linkage
  modified_base 3: mod_base = OTHER; note = 2'-O-methyl modified nucleotide with phosphorothioate linkage
  modified_base 29: mod_base = OTHER; note = 2'-O-methyl modified nucleotide
  modified_base 30: mod_base = OTHER; note = 2'-O-methyl modified nucleotide
  modified_base 31: mod_base = OTHER; note = 2'-O-methyl modified nucleotide
  modified_base 32: mod_base = OTHER; note = 2'-O-methyl modified nucleotide
  modified_base 33: mod_base = OTHER; note = 2'-O-methyl modified nucleotide
  modified_base 34: mod_base = OTHER; note = 2'-O-methyl modified nucleotide
  modified_base 35: mod_base = OTHER; note = 2'-O-methyl modified nucleotide
  modified_base 36: mod_base = OTHER; note = 2'-O-methyl modified nucleotide
  modified_base 37: mod_base = OTHER; note = 2'-O-methyl modified nucleotide
  modified_base 38: mod_base = OTHER; note = 2'-O-methyl modified nucleotide
  modified_base 39: mod_base = OTHER; note = 2'-O-methyl modified nucleotide
  modified_base 40: mod_base = OTHER; note = 2'-O-methyl modified nucleotide
  modified_base 69: mod_base = OTHER; note = 2'-O-methyl modified nucleotide
  modified_base 70: mod_base = OTHER; note = 2'-O-methyl modified nucleotide
  modified_base 71: mod_base = OTHER; note = 2'-O-methyl modified nucleotide
  modified_base 72: mod_base = OTHER; note = 2'-O-methyl modified nucleotide
  modified_base 73: mod_base = OTHER; note = 2'-O-methyl modified nucleotide
  modified_base 74: mod_base = OTHER; note = 2'-O-methyl modified nucleotide
  modified_base 75: mod_base = OTHER; note = 2'-O-methyl modified nucleotide
  modified_base 76: mod_base = OTHER; note = 2'-O-methyl modified nucleotide
  modified_base 77: mod_base = OTHER; note = 2'-O-methyl modified nucleotide
  modified_base 78: mod_base = OTHER; note = 2'-O-methyl modified nucleotide
  modified_base 79: mod_base = OTHER; note = 2'-O-methyl modified nucleotide
  modified_base 80: mod_base = OTHER; note = 2'-O-methyl modified nucleotide
  modified_base 81: mod_base = OTHER; note = 2'-O-methyl modified nucleotide
  modified_base 82: mod_base = OTHER; note = 2'-O-methyl modified nucleotide
  modified_base 83: mod_base = OTHER; note = 2'-O-methyl modified nucleotide
  modified_base 84: mod_base = OTHER; note = 2'-O-methyl modified nucleotide
  modified_base 85: mod_base = OTHER; note = 2'-O-methyl modified nucleotide
  modified_base 86: mod_base = OTHER; note = 2'-O-methyl modified nucleotide
  modified_base 87: mod_base = OTHER; note = 2'-O-methyl modified nucleotide
  modified_base 88: mod_base = OTHER; note = 2'-O-methyl modified nucleotide
  modified_base 89: mod_base = OTHER; note = 2'-O-methyl modified nucleotide
  modified_base 90: mod_base = OTHER; note = 2'-O-methyl modified nucleotide
  modified_base 91: mod_base = OTHER; note = 2'-O-methyl modified nucleotide
  modified_base 92: mod_base = OTHER; note = 2'-O-methyl modified nucleotide
  modified_base 93: mod_base = OTHER; note = 2'-O-methyl modified nucleotide
  modified_base 94: mod_base = OTHER; note = 2'-O-methyl modified nucleotide
  modified_base 95: mod_base = OTHER; note = 2'-O-methyl modified nucleotide
  modified_base 96: mod_base = OTHER; note = 2'-O-methyl modified nucleotide
  modified_base 122: mod_base = OTHER; note = Nucleotide with phosphorothioate linkage
  modified_base 123: mod_base = OTHER; note = 2'-O-methyl modified nucleotide with phosphorothioate linkage
  modified_base 124: mod_base = OTHER; note = 2'-O-methyl modified nucleotide with phosphorothioate linkage
  modified_base 125: mod_base = OTHER; note = 2'-O-methyl modified nucleotide
gagaatcaaaatcggtgaatgttttagagctagaaatagcaagttaaaataaggctagtccgttatcaacttgaaaaagtggcaccgagtcggtgctgacaagtctgtcattcaccgattttgat

SEQ ID NO: 16278 - RNA, 124 nt, synthetic construct
  source 1..124: mol_type = other RNA
  modified_base 1: mod_base = OTHER; note = 2'-O-methyl modified nucleotide with phosphorothioate linkage
  modified_base 2: mod_base = OTHER; note = 2'-O-methyl modified nucleotide with phosphorothioate linkage
  modified_base 3: mod_base = OTHER; note = 2'-O-methyl modified nucleotide with phosphorothioate linkage
  modified_base 29: mod_base = OTHER; note = 2'-O-methyl modified nucleotide
  modified_base 30: mod_base = OTHER; note = 2'-O-methyl modified nucleotide
  modified_base 31: mod_base = OTHER; note = 2'-O-methyl modified nucleotide
  modified_base 32: mod_base = OTHER; note = 2'-O-methyl modified nucleotide
  modified_base 33: mod_base = OTHER; note = 2'-O-methyl modified nucleotide
  modified_base 34: mod_base = OTHER; note = 2'-O-methyl modified nucleotide
  modified_base 35: mod_base = OTHER; note = 2'-O-methyl modified nucleotide
  modified_base 36: mod_base = OTHER; note = 2'-O-methyl modified nucleotide
  modified_base 37: mod_base = OTHER; note = 2'-O-methyl modified nucleotide
  modified_base 38: mod_base = OTHER; note = 2'-O-methyl modified nucleotide
  modified_base 39: mod_base = OTHER; note = 2'-O-methyl modified nucleotide
  modified_base 40: mod_base = OTHER; note = 2'-O-methyl modified nucleotide
  modified_base 69: mod_base = OTHER; note = 2'-O-methyl modified nucleotide
  modified_base 70: mod_base = OTHER; note = 2'-O-methyl modified nucleotide
  modified_base 71: mod_base = OTHER; note = 2'-O-methyl modified nucleotide
  modified_base 72: mod_base = OTHER; note = 2'-O-methyl modified nucleotide
  modified_base 73: mod_base = OTHER; note = 2'-O-methyl modified nucleotide
  modified_base 74: mod_base = OTHER; note = 2'-O-methyl modified nucleotide
  modified_base 75: mod_base = OTHER; note = 2'-O-methyl modified nucleotide
  modified_base 76: mod_base = OTHER; note = 2'-O-methyl modified nucleotide
  modified_base 77: mod_base = OTHER; note = 2'-O-methyl modified nucleotide
  modified_base 78: mod_base = OTHER; note = 2'-O-methyl modified nucleotide
  modified_base 79: mod_base = OTHER; note = 2'-O-methyl modified nucleotide
  modified_base 80: mod_base = OTHER; note = 2'-O-methyl modified nucleotide
  modified_base 81: mod_base = OTHER; note = 2'-O-methyl modified nucleotide
  modified_base 82: mod_base = OTHER; note = 2'-O-methyl modified nucleotide
  modified_base 83: mod_base = OTHER; note = 2'-O-methyl modified nucleotide
  modified_base 84: mod_base = OTHER; note = 2'-O-methyl modified nucleotide
  modified_base 85: mod_base = OTHER; note = 2'-O-methyl modified nucleotide
  modified_base 86: mod_base = OTHER; note = 2'-O-methyl modified nucleotide
  modified_base 87: mod_base = OTHER; note = 2'-O-methyl modified nucleotide
  modified_base 88: mod_base = OTHER; note = 2'-O-methyl modified nucleotide
  modified_base 89: mod_base = OTHER; note = 2'-O-methyl modified nucleotide
  modified_base 90: mod_base = OTHER; note = 2'-O-methyl modified nucleotide
  modified_base 91: mod_base = OTHER; note = 2'-O-methyl modified nucleotide
  modified_base 92: mod_base = OTHER; note = 2'-O-methyl modified nucleotide
  modified_base 93: mod_base = OTHER; note = 2'-O-methyl modified nucleotide
  modified_base 94: mod_base = OTHER; note = 2'-O-methyl modified nucleotide
  modified_base 95: mod_base = OTHER; note = 2'-O-methyl modified nucleotide
  modified_base 96: mod_base = OTHER; note = 2'-O-methyl modified nucleotide
  modified_base 121: mod_base = OTHER; note = Nucleotide with phosphorothioate linkage
  modified_base 122: mod_base = OTHER; note = 2'-O-methyl modified nucleotide with phosphorothioate linkage
  modified_base 123: mod_base = OTHER; note = 2'-O-methyl modified nucleotide with phosphorothioate linkage
  modified_base 124: mod_base = OTHER; note = 2'-O-methyl modified nucleotide
gagaatcaaaatcggtgaatgttttagagctagaaatagcaagttaaaataaggctagtccgttatcaacttgaaaaagtggcaccgagtcggtgctgacaagtctgtcattcaccgattttga

SEQ ID NO: 16279 - RNA, 123 nt, synthetic construct
  source 1..123: mol_type = other RNA
  modified_base 1: mod_base = OTHER; note = 2'-O-methyl modified nucleotide with phosphorothioate linkage
  modified_base 2: mod_base = OTHER; note = 2'-O-methyl modified nucleotide with phosphorothioate linkage
  modified_base 3: mod_base = OTHER; note = 2'-O-methyl modified nucleotide with phosphorothioate linkage
  modified_base 29: mod_base = OTHER; note = 2'-O-methyl modified nucleotide
  modified_base 30: mod_base = OTHER; note = 2'-O-methyl modified nucleotide
  modified_base 31: mod_base = OTHER; note = 2'-O-methyl modified nucleotide
  modified_base 32: mod_base = OTHER; note = 2'-O-methyl modified nucleotide
  modified_base 33: mod_base = OTHER; note = 2'-O-methyl modified nucleotide
  modified_base 34: mod_base = OTHER; note = 2'-O-methyl modified nucleotide
  modified_base 35: mod_base = OTHER; note = 2'-O-methyl modified nucleotide
  modified_base 36: mod_base = OTHER; note = 2'-O-methyl modified nucleotide
  modified_base 37: mod_base = OTHER; note = 2'-O-methyl modified nucleotide
  modified_base 38: mod_base = OTHER; note = 2'-O-methyl modified nucleotide
  modified_base 39: mod_base = OTHER; note = 2'-O-methyl modified nucleotide
  modified_base 40: mod_base = OTHER; note = 2'-O-methyl modified nucleotide
  modified_base 69: mod_base = OTHER; note = 2'-O-methyl modified nucleotide
  modified_base 70: mod_base = OTHER; note = 2'-O-methyl modified nucleotide
  modified_base 71: mod_base = OTHER; note = 2'-O-methyl modified nucleotide
  modified_base 72: mod_base = OTHER; note = 2'-O-methyl modified nucleotide
  modified_base 73: mod_base = OTHER; note = 2'-O-methyl modified nucleotide
  modified_base 74: mod_base = OTHER; note = 2'-O-methyl modified nucleotide
  modified_base 75: mod_base = OTHER; note = 2'-O-methyl modified nucleotide
  modified_base 76: mod_base = OTHER; note = 2'-O-methyl modified nucleotide
  modified_base 77: mod_base = OTHER; note = 2'-O-methyl modified nucleotide
  modified_base 78: mod_base = OTHER; note = 2'-O-methyl modified nucleotide
  modified_base 79: mod_base = OTHER; note = 2'-O-methyl modified nucleotide
  modified_base 80: mod_base = OTHER; note = 2'-O-methyl modified nucleotide
  modified_base 81: mod_base = OTHER; note = 2'-O-methyl modified nucleotide
  modified_base 82: mod_base = OTHER; note = 2'-O-methyl modified nucleotide
  modified_base 83: mod_base = OTHER; note = 2'-O-methyl modified nucleotide
  modified_base 84: mod_base = OTHER; note = 2'-O-methyl modified nucleotide
  modified_base 85: mod_base = OTHER; note = 2'-O-methyl modified nucleotide
  modified_base 86: mod_base = OTHER; note = 2'-O-methyl modified nucleotide
  modified_base 87: mod_base = OTHER; note = 2'-O-methyl modified nucleotide
  modified_base 88: mod_base = OTHER; note = 2'-O-methyl modified nucleotide
  modified_base 89: mod_base = OTHER; note = 2'-O-methyl modified nucleotide
  modified_base 90: mod_base = OTHER; note = 2'-O-methyl modified nucleotide
  modified_base 91: mod_base = OTHER; note = 2'-O-methyl modified nucleotide
  modified_base 92: mod_base = OTHER; note = 2'-O-methyl modified nucleotide
  modified_base 93: mod_base = OTHER; note = 2'-O-methyl modified nucleotide
  modified_base 94: mod_base = OTHER; note = 2'-O-methyl modified nucleotide
  modified_base 95: mod_base = OTHER; note = 2'-O-methyl modified nucleotide
  modified_base 96: mod_base = OTHER; note = 2'-O-methyl modified nucleotide
  modified_base 120: mod_base = OTHER; note = Nucleotide with phosphorothioate linkage
  modified_base 121: mod_base = OTHER; note = 2'-O-methyl modified nucleotide with phosphorothioate linkage
  modified_base 122: mod_base = OTHER; note = 2'-O-methyl modified nucleotide with phosphorothioate linkage
  modified_base 123: mod_base = OTHER; note = 2'-O-methyl modified nucleotide
gagaatcaaaatcggtgaatgttttagagctagaaatagcaagttaaaataaggctagtccgttatcaacttgaaaaagtggcaccgagtcggtgctgacaagtctgtcattcaccgattttg

SEQ ID NO: 16280 - RNA, 122 nt, synthetic construct
  source 1..122: mol_type = other RNA
  modified_base 1: mod_base = OTHER; note = 2'-O-methyl modified nucleotide with phosphorothioate linkage
  modified_base 2: mod_base = OTHER; note = 2'-O-methyl modified nucleotide with phosphorothioate linkage
  modified_base 3: mod_base = OTHER; note = 2'-O-methyl modified nucleotide with phosphorothioate linkage
  modified_base 29: mod_base = OTHER; note = 2'-O-methyl modified nucleotide
  modified_base 30: mod_base = OTHER; note = 2'-O-methyl modified nucleotide
  modified_base 31: mod_base = OTHER; note = 2'-O-methyl modified nucleotide
  modified_base 32: mod_base = OTHER; note = 2'-O-methyl modified nucleotide
  modified_base 33: mod_base = OTHER; note = 2'-O-methyl modified nucleotide
  modified_base 34: mod_base = OTHER; note = 2'-O-methyl modified nucleotide
  modified_base 35: mod_base = OTHER; note = 2'-O-methyl modified nucleotide
  modified_base 36: mod_base = OTHER; note = 2'-O-methyl modified nucleotide
  modified_base 37: mod_base = OTHER; note = 2'-O-methyl modified nucleotide
  modified_base 38: mod_base = OTHER; note = 2'-O-methyl modified nucleotide
  modified_base 39: mod_base = OTHER; note = 2'-O-methyl modified nucleotide
  modified_base 40: mod_base = OTHER; note = 2'-O-methyl modified nucleotide
  modified_base 69: mod_base = OTHER; note = 2'-O-methyl modified nucleotide
  modified_base 70: mod_base = OTHER; note = 2'-O-methyl modified nucleotide
  modified_base 71: mod_base = OTHER; note = 2'-O-methyl modified nucleotide
  modified_base 72: mod_base = OTHER; note = 2'-O-methyl modified nucleotide
  modified_base 73: mod_base = OTHER; note = 2'-O-methyl modified nucleotide
  modified_base 74: mod_base = OTHER; note = 2'-O-methyl modified nucleotide
  modified_base 75: mod_base = OTHER; note = 2'-O-methyl modified nucleotide
  modified_base 76: mod_base = OTHER; note = 2'-O-methyl modified nucleotide
  modified_base 77: mod_base = OTHER; note = 2'-O-methyl modified nucleotide
  modified_base 78: mod_base = OTHER; note = 2'-O-methyl modified nucleotide
  modified_base 79: mod_base = OTHER; note = 2'-O-methyl modified nucleotide
  modified_base 80: mod_base = OTHER; note = 2'-O-methyl modified nucleotide
  modified_base 81: mod_base = OTHER; note = 2'-O-methyl modified nucleotide
  modified_base 82: mod_base = OTHER; note = 2'-O-methyl modified nucleotide
  modified_base 83: mod_base = OTHER; note = 2'-O-methyl modified nucleotide
  modified_base 84: mod_base = OTHER; note = 2'-O-methyl modified nucleotide
  modified_base 85: mod_base = OTHER; note = 2'-O-methyl modified nucleotide
  modified_base 86: mod_base = OTHER; note = 2'-O-methyl modified nucleotide
  modified_base 87: mod_base = OTHER; note = 2'-O-methyl modified nucleotide
  modified_base 88: mod_base = OTHER; note = 2'-O-methyl modified nucleotide
  modified_base 89: mod_base = OTHER; note = 2'-O-methyl modified nucleotide
  modified_base 90: mod_base = OTHER; note = 2'-O-methyl modified nucleotide
  modified_base 91: mod_base = OTHER; note = 2'-O-methyl modified nucleotide
  modified_base 92: mod_base = OTHER; note = 2'-O-methyl modified nucleotide
  modified_base 93: mod_base = OTHER; note = 2'-O-methyl modified nucleotide
  modified_base 94: mod_base = OTHER; note = 2'-O-methyl modified nucleotide
  modified_base 95: mod_base = OTHER; note = 2'-O-methyl modified nucleotide
  modified_base 96: mod_base = OTHER; note = 2'-O-methyl modified nucleotide
  modified_base 119: mod_base = OTHER; note = Nucleotide with phosphorothioate linkage
  modified_base 120: mod_base = OTHER; note = 2'-O-methyl modified nucleotide with phosphorothioate linkage
  modified_base 121: mod_base = OTHER; note = 2'-O-methyl modified nucleotide with phosphorothioate linkage
  modified_base 122: mod_base = OTHER; note = 2'-O-methyl modified nucleotide
gagaatcaaaatcggtgaatgttttagagctagaaatagcaagttaaaataaggctagtccgttatcaacttgaaaaagtggcaccgagtcggtgctgacaagtctgtcattcaccgatttt

SEQ ID NO: 16281 - RNA, 121 nt, synthetic construct
  source 1..121: mol_type = other RNA
  modified_base 1: mod_base = OTHER; note = 2'-O-methyl modified nucleotide with phosphorothioate linkage
  modified_base 2: mod_base = OTHER; note = 2'-O-methyl modified nucleotide with phosphorothioate linkage
  modified_base 3: mod_base = OTHER; note = 2'-O-methyl modified nucleotide with phosphorothioate linkage
  modified_base 29: mod_base = OTHER; note = 2'-O-methyl modified nucleotide
  modified_base 30: mod_base = OTHER; note = 2'-O-methyl modified nucleotide
  modified_base 31: mod_base = OTHER; note = 2'-O-methyl modified nucleotide
  modified_base 32: mod_base = OTHER; note = 2'-O-methyl modified nucleotide
  modified_base 33: mod_base = OTHER; note = 2'-O-methyl modified nucleotide
  modified_base 34: mod_base = OTHER; note = 2'-O-methyl modified nucleotide
  modified_base 35: mod_base = OTHER; note = 2'-O-methyl modified nucleotide
  modified_base 36: mod_base = OTHER; note = 2'-O-methyl modified nucleotide
  modified_base 37: mod_base = OTHER; note = 2'-O-methyl modified nucleotide
  modified_base 38: mod_base = OTHER; note = 2'-O-methyl modified nucleotide
  modified_base 39: mod_base = OTHER; note = 2'-O-methyl modified nucleotide
  modified_base 40: mod_base = OTHER; note = 2'-O-methyl modified nucleotide
  modified_base 69: mod_base = OTHER; note = 2'-O-methyl modified nucleotide
  modified_base 70: mod_base = OTHER; note = 2'-O-methyl modified nucleotide
  modified_base 71: mod_base = OTHER; note = 2'-O-methyl modified nucleotide
  modified_base 72: mod_base = OTHER; note = 2'-O-methyl modified nucleotide
  modified_base 73: mod_base = OTHER; note = 2'-O-methyl modified nucleotide
  modified_base 74: mod_base = OTHER; note = 2'-O-methyl modified nucleotide
  modified_base 75: mod_base = OTHER; note = 2'-O-methyl modified nucleotide
  modified_base 76: mod_base = OTHER; note = 2'-O-methyl modified nucleotide
  modified_base 77: mod_base = OTHER; note = 2'-O-methyl modified nucleotide
  modified_base 78: mod_base = OTHER; note = 2'-O-methyl modified nucleotide
  modified_base 79: mod_base = OTHER; note = 2'-O-methyl modified nucleotide
  modified_base 80: mod_base = OTHER; note = 2'-O-methyl modified nucleotide
  modified_base 81: mod_base = OTHER; note = 2'-O-methyl modified nucleotide
  modified_base 82: mod_base = OTHER; note = 2'-O-methyl modified nucleotide
  modified_base 83: mod_base = OTHER; note = 2'-O-methyl modified nucleotide
  modified_base 84: mod_base = OTHER; note = 2'-O-methyl modified nucleotide
  modified_base 85: mod_base = OTHER; note = 2'-O-methyl modified nucleotide
  modified_base 86: mod_base = OTHER; note = 2'-O-methyl modified nucleotide
  modified_base 87: mod_base = OTHER; note = 2'-O-methyl modified nucleotide
  modified_base 88: mod_base = OTHER; note = 2'-O-methyl modified nucleotide
  modified_base 89: mod_base = OTHER; note = 2'-O-methyl modified nucleotide
  modified_base 90: mod_base = OTHER; note = 2'-O-methyl modified nucleotide
  modified_base 91: mod_base = OTHER; note = 2'-O-methyl modified nucleotide
  modified_base 92: mod_base = OTHER; note = 2'-O-methyl modified nucleotide
  modified_base 93: mod_base = OTHER; note = 2'-O-methyl modified nucleotide
  modified_base 94: mod_base = OTHER; note = 2'-O-methyl modified nucleotide
  modified_base 95: mod_base = OTHER; note = 2'-O-methyl modified nucleotide
  modified_base 96: mod_base = OTHER; note = 2'-O-methyl modified nucleotide
  modified_base 118: mod_base = OTHER; note = Nucleotide with phosphorothioate linkage
  modified_base 119: mod_base = OTHER; note = 2'-O-methyl modified nucleotide with phosphorothioate linkage
  modified_base 120: mod_base = OTHER; note = 2'-O-methyl modified nucleotide with phosphorothioate linkage
  modified_base 121: mod_base = OTHER; note = 2'-O-methyl modified nucleotide
gagaatcaaaatcggtgaatgttttagagctagaaatagcaagttaaaataaggctagtccgttatcaacttgaaaaagtggcaccgagtcggtgctgacaagtctgtcattcaccgattt

SEQ ID NO: 16282 - RNA, 120 nt, synthetic construct
  source 1..120: mol_type = other RNA
  modified_base 1: mod_base = OTHER; note = 2'-O-methyl modified nucleotide with phosphorothioate linkage
  modified_base 2: mod_base = OTHER; note = 2'-O-methyl modified nucleotide with phosphorothioate linkage
  modified_base 3: mod_base = OTHER; note = 2'-O-methyl modified nucleotide with phosphorothioate linkage
  modified_base 29: mod_base = OTHER; note = 2'-O-methyl modified nucleotide
  modified_base 30: mod_base = OTHER; note = 2'-O-methyl modified nucleotide
  modified_base 31: mod_base = OTHER; note = 2'-O-methyl modified nucleotide
  modified_base 32: mod_base = OTHER; note = 2'-O-methyl modified nucleotide
  modified_base 33: mod_base = OTHER; note = 2'-O-methyl modified nucleotide
  modified_base 34: mod_base = OTHER; note = 2'-O-methyl modified nucleotide
  modified_base 35: mod_base = OTHER; note = 2'-O-methyl modified nucleotide
  modified_base 36: mod_base = OTHER; note = 2'-O-methyl modified nucleotide
  modified_base 37: mod_base = OTHER; note = 2'-O-methyl modified nucleotide
  modified_base 38: mod_base = OTHER; note = 2'-O-methyl modified nucleotide
  modified_base 39: mod_base = OTHER; note = 2'-O-methyl modified nucleotide
  modified_base 40: mod_base = OTHER; note = 2'-O-methyl modified nucleotide
  modified_base 69: mod_base = OTHER; note = 2'-O-methyl modified nucleotide
  modified_base 70: mod_base = OTHER; note = 2'-O-methyl modified nucleotide
  modified_base 71: mod_base = OTHER; note = 2'-O-methyl modified nucleotide
  modified_base 72: mod_base = OTHER; note = 2'-O-methyl modified nucleotide
  modified_base 73: mod_base = OTHER; note = 2'-O-methyl modified nucleotide
  modified_base 74: mod_base = OTHER; note = 2'-O-methyl modified nucleotide
  modified_base 75: mod_base = OTHER; note = 2'-O-methyl modified nucleotide
  modified_base 76: mod_base = OTHER; note = 2'-O-methyl modified nucleotide
  modified_base 77: mod_base = OTHER; note = 2'-O-methyl modified nucleotide
  modified_base 78: mod_base = OTHER; note = 2'-O-methyl modified nucleotide
  modified_base 79: mod_base = OTHER; note = 2'-O-methyl modified nucleotide
  modified_base 80: mod_base = OTHER; note = 2'-O-methyl modified nucleotide
  modified_base 81: mod_base = OTHER; note = 2'-O-methyl modified nucleotide
  modified_base 82: mod_base = OTHER; note = 2'-O-methyl modified nucleotide
  modified_base 83: mod_base = OTHER; note = 2'-O-methyl modified nucleotide
  modified_base 84: mod_base = OTHER; note = 2'-O-methyl modified nucleotide
  modified_base 85: mod_base = OTHER; note = 2'-O-methyl modified nucleotide
  modified_base 86: mod_base = OTHER; note = 2'-O-methyl modified nucleotide
  modified_base 87: mod_base = OTHER; note = 2'-O-methyl modified nucleotide
  modified_base 88: mod_base = OTHER; note = 2'-O-methyl modified nucleotide
  modified_base 89: mod_base = OTHER; note = 2'-O-methyl modified nucleotide
  modified_base 90: mod_base = OTHER; note = 2'-O-methyl modified nucleotide
  modified_base 91: mod_base = OTHER; note = 2'-O-methyl modified nucleotide
  modified_base 92: mod_base = OTHER; note = 2'-O-methyl modified nucleotide
  modified_base 93: mod_base = OTHER; note = 2'-O-methyl modified nucleotide
  modified_base 94: mod_base = OTHER; note = 2'-O-methyl modified nucleotide
  modified_base 95: mod_base = OTHER; note = 2'-O-methyl modified nucleotide
  modified_base 96: mod_base = OTHER; note = 2'-O-methyl modified nucleotide
  modified_base 117: mod_base = OTHER; note = Nucleotide with phosphorothioate linkage
  modified_base 118: mod_base = OTHER; note = 2'-O-methyl modified nucleotide with phosphorothioate linkage
  modified_base 119: mod_base = OTHER; note = 2'-O-methyl modified nucleotide with phosphorothioate linkage
  modified_base 120: mod_base = OTHER; note = 2'-O-methyl modified nucleotide
gagaatcaaaatcggtgaatgttttagagctagaaatagcaagttaaaataaggctagtccgttatcaacttgaaaaagtggcaccgagtcggtgctgacaagtctgtcattcaccgatt

SEQ ID NO: 16283 - RNA, 127 nt, synthetic construct
  source 1..127: mol_type = other RNA
  modified_base 1: mod_base = OTHER; note = 2'-O-methyl modified nucleotide with phosphorothioate linkage
  modified_base 2: mod_base = OTHER; note = 2'-O-methyl modified nucleotide with phosphorothioate linkage
  modified_base 3: mod_base = OTHER; note = 2'-O-methyl modified nucleotide with phosphorothioate linkage
  modified_base 29: mod_base = OTHER; note = 2'-O-methyl modified nucleotide
  modified_base 30: mod_base = OTHER; note = 2'-O-methyl modified nucleotide
  modified_base 31: mod_base = OTHER; note = 2'-O-methyl modified nucleotide
  modified_base 32: mod_base = OTHER; note = 2'-O-methyl modified nucleotide
  modified_base 33: mod_base = OTHER; note = 2'-O-methyl modified nucleotide
  modified_base 34: mod_base = OTHER; note = 2'-O-methyl modified nucleotide
  modified_base 35: mod_base = OTHER; note = 2'-O-methyl modified nucleotide
  modified_base 36: mod_base = OTHER; note = 2'-O-methyl modified nucleotide
  modified_base 37: mod_base = OTHER; note = 2'-O-methyl modified nucleotide
  modified_base 38: mod_base = OTHER; note = 2'-O-methyl modified nucleotide
  modified_base 39: mod_base = OTHER; note = 2'-O-methyl modified nucleotide
  modified_base 40: mod_base = OTHER; note = 2'-O-methyl modified nucleotide
  modified_base 69: mod_base = OTHER; note = 2'-O-methyl modified nucleotide
  modified_base 70: mod_base = OTHER; note = 2'-O-methyl modified nucleotide
  modified_base 71: mod_base = OTHER; note = 2'-O-methyl modified nucleotide
  modified_base 72: mod_base = OTHER; note = 2'-O-methyl modified nucleotide
  modified_base 73: mod_base = OTHER; note = 2'-O-methyl modified nucleotide
  modified_base 74: mod_base = OTHER; note = 2'-O-methyl modified nucleotide
  modified_base 75: mod_base = OTHER; note = 2'-O-methyl modified nucleotide
  modified_base 76: mod_base = OTHER; note = 2'-O-methyl modified nucleotide
  modified_base 77: mod_base = OTHER; note = 2'-O-methyl modified nucleotide
  modified_base 78: mod_base = OTHER; note = 2'-O-methyl modified nucleotide
  modified_base 79: mod_base = OTHER; note = 2'-O-methyl modified nucleotide
  modified_base 80: mod_base = OTHER; note = 2'-O-methyl modified nucleotide
  modified_base 81: mod_base = OTHER; note = 2'-O-methyl modified nucleotide
  modified_base 82: mod_base = OTHER; note = 2'-O-methyl modified nucleotide
  modified_base 83: mod_base = OTHER; note = 2'-O-methyl modified nucleotide
  modified_base 84: mod_base = OTHER; note = 2'-O-methyl modified nucleotide
  modified_base 85: mod_base = OTHER; note = 2'-O-methyl modified nucleotide
  modified_base 86: mod_base = OTHER; note = 2'-O-methyl modified nucleotide
  modified_base 87: mod_base = OTHER; note = 2'-O-methyl modified nucleotide
  modified_base 88: mod_base = OTHER; note = 2'-O-methyl modified nucleotide
  modified_base 89: mod_base = OTHER; note = 2'-O-methyl modified nucleotide
  modified_base 90: mod_base = OTHER; note = 2'-O-methyl modified nucleotide
  modified_base 91: mod_base = OTHER; note = 2'-O-methyl modified nucleotide
  modified_base 92: mod_base = OTHER; note = 2'-O-methyl modified nucleotide
  modified_base 93: mod_base = OTHER; note = 2'-O-methyl modified nucleotide
  modified_base 94: mod_base = OTHER; note = 2'-O-methyl modified nucleotide
  modified_base 95: mod_base = OTHER; note = 2'-O-methyl modified nucleotide
  modified_base 96: mod_base = OTHER; note = 2'-O-methyl modified nucleotide
  modified_base 124: mod_base = OTHER; note = Nucleotide with phosphorothioate linkage
  modified_base 125: mod_base = OTHER; note = 2'-O-methyl modified nucleotide with phosphorothioate linkage
  modified_base 126: mod_base = OTHER; note = 2'-O-methyl modified nucleotide with phosphorothioate linkage
  modified_base 127: mod_base = OTHER; note = 2'-O-methyl modified nucleotide
gagaatcaaaatcggtgaatgttttagagctagaaatagcaagttaaaataaggctagtccgttatcaacttgaaaaagtggcaccgagtcggtgcagtgacaagtctgtcattcaccgattttgat

SEQ ID NO: 16284 - RNA, 126 nt, synthetic construct
  source 1..126: mol_type = other RNA
  modified_base 1: mod_base = OTHER; note = 2'-O-methyl modified nucleotide with phosphorothioate linkage
  modified_base 2: mod_base = OTHER; note = 2'-O-methyl modified nucleotide with phosphorothioate linkage
  modified_base 3: mod_base = OTHER; note = 2'-O-methyl modified nucleotide with phosphorothioate linkage
  modified_base 29: mod_base = OTHER; note = 2'-O-methyl modified nucleotide
  modified_base 30: mod_base = OTHER; note = 2'-O-methyl modified nucleotide
  modified_base 31: mod_base = OTHER; note = 2'-O-methyl modified nucleotide
  modified_base 32: mod_base = OTHER; note = 2'-O-methyl modified nucleotide
  modified_base 33: mod_base = OTHER; note = 2'-O-methyl modified nucleotide
  modified_base 34: mod_base = OTHER; note = 2'-O-methyl modified nucleotide
  modified_base 35: mod_base = OTHER; note = 2'-O-methyl modified nucleotide
  modified_base 36: mod_base = OTHER; note = 2'-O-methyl modified nucleotide
  modified_base 37: mod_base = OTHER; note = 2'-O-methyl modified nucleotide
  modified_base 38: mod_base = OTHER; note = 2'-O-methyl modified nucleotide
  modified_base 39: mod_base = OTHER; note = 2'-O-methyl modified nucleotide
  modified_base 40: mod_base = OTHER; note = 2'-O-methyl modified nucleotide
  modified_base 69: mod_base = OTHER; note = 2'-O-methyl modified nucleotide
  modified_base 70: mod_base = OTHER; note = 2'-O-methyl modified nucleotide
  modified_base 71: mod_base = OTHER; note = 2'-O-methyl modified nucleotide
  modified_base 72: mod_base = OTHER; note = 2'-O-methyl modified nucleotide
  modified_base 73: mod_base = OTHER; note = 2'-O-methyl modified nucleotide
  modified_base 74: mod_base = OTHER; note = 2'-O-methyl modified nucleotide
  modified_base 75: mod_base = OTHER; note = 2'-O-methyl modified nucleotide
  modified_base 76: mod_base = OTHER; note = 2'-O-methyl modified nucleotide
  modified_base 77: mod_base = OTHER; note = 2'-O-methyl modified nucleotide
  modified_base 78: mod_base = OTHER; note = 2'-O-methyl modified nucleotide
  modified_base 79: mod_base = OTHER; note = 2'-O-methyl modified nucleotide
  modified_base 80: mod_base = OTHER; note = 2'-O-methyl modified nucleotide
  modified_base 81: mod_base = OTHER; note = 2'-O-methyl modified nucleotide
  modified_base 82: mod_base = OTHER; note = 2'-O-methyl modified nucleotide
  modified_base 83: mod_base = OTHER; note = 2'-O-methyl modified nucleotide
  modified_base 84: mod_base = OTHER; note = 2'-O-methyl modified nucleotide
  modified_base 85: mod_base = OTHER; note = 2'-O-methyl modified nucleotide
  modified_base 86: mod_base = OTHER; note = 2'-O-methyl modified nucleotide
  modified_base 87: mod_base = OTHER; note = 2'-O-methyl modified nucleotide
  modified_base 88: mod_base = OTHER; note = 2'-O-methyl modified nucleotide
  modified_base 89: mod_base = OTHER; note = 2'-O-methyl modified nucleotide
  modified_base 90: mod_base = OTHER; note = 2'-O-methyl modified nucleotide
  modified_base 91: mod_base = OTHER; note = 2'-O-methyl modified nucleotide
  modified_base 92: mod_base = OTHER; note = 2'-O-methyl modified nucleotide
  modified_base 93: mod_base = OTHER; note = 2'-O-methyl modified nucleotide
  modified_base 94: mod_base = OTHER; note = 2'-O-methyl modified nucleotide
  modified_base 95: mod_base = OTHER; note = 2'-O-methyl modified nucleotide
  modified_base 96: mod_base = OTHER; note = 2'-O-methyl modified nucleotide
  modified_base 123: mod_base = OTHER; note = Nucleotide with phosphorothioate linkage
  modified_base 124: mod_base = OTHER; note = 2'-O-methyl modified nucleotide with phosphorothioate linkage
  modified_base 125: mod_base = OTHER; note = 2'-O-methyl modified nucleotide with phosphorothioate linkage
  modified_base 126: mod_base = OTHER; note = 2'-O-methyl modified nucleotide
gagaatcaaaatcggtgaatgttttagagctagaaatagcaagttaaaataaggctagtccgttatcaacttgaaaaagtggcaccgagtcggtgcagtgacaagtctgtcattcaccgattttga

SEQ ID NO: 16285 - RNA, 125 nt, synthetic construct
  source 1..125: mol_type = other RNA
  modified_base 1: mod_base = OTHER; note = 2'-O-methyl modified nucleotide with phosphorothioate linkage
  modified_base 2: mod_base = OTHER; note = 2'-O-methyl modified nucleotide with phosphorothioate linkage
  modified_base 3: mod_base = OTHER; note = 2'-O-methyl modified nucleotide with phosphorothioate linkage
  modified_base 29: mod_base = OTHER; note = 2'-O-methyl modified nucleotide
  modified_base 30: mod_base = OTHER; note = 2'-O-methyl modified nucleotide
  modified_base 31: mod_base = OTHER; note = 2'-O-methyl modified nucleotide
  modified_base 32: mod_base = OTHER; note = 2'-O-methyl modified nucleotide
  modified_base 33: mod_base = OTHER; note = 2'-O-methyl modified nucleotide
  modified_base 34: mod_base = OTHER; note = 2'-O-methyl modified nucleotide
  modified_base 35: mod_base = OTHER; note = 2'-O-methyl modified nucleotide
  modified_base 36: mod_base = OTHER; note = 2'-O-methyl modified nucleotide
  modified_base 37: mod_base = OTHER; note = 2'-O-methyl modified nucleotide
  modified_base 38: mod_base = OTHER; note = 2'-O-methyl modified nucleotide
  modified_base 39: mod_base = OTHER; note = 2'-O-methyl modified nucleotide
  modified_base 40: mod_base = OTHER; note = 2'-O-methyl modified nucleotide
  modified_base 69: mod_base = OTHER; note = 2'-O-methyl modified nucleotide
  modified_base 70: mod_base = OTHER; note = 2'-O-methyl modified nucleotide
  modified_base 71: mod_base = OTHER; note = 2'-O-methyl modified nucleotide
  modified_base 72: mod_base = OTHER; note = 2'-O-methyl modified nucleotide
  modified_base 73: mod_base = OTHER; note = 2'-O-methyl modified nucleotide
  modified_base 74: mod_base = OTHER; note = 2'-O-methyl modified nucleotide
  modified_base 75: mod_base = OTHER; note = 2'-O-methyl modified nucleotide
  modified_base 76: mod_base = OTHER; note = 2'-O-methyl modified nucleotide
  modified_base 77: mod_base = OTHER; note = 2'-O-methyl modified nucleotide
  modified_base 78: mod_base = OTHER; note = 2'-O-methyl modified nucleotide
  modified_base 79: mod_base = OTHER; note = 2'-O-methyl modified nucleotide
  modified_base 80: mod_base = OTHER; note = 2'-O-methyl modified nucleotide
  modified_base 81: mod_base = OTHER; note = 2'-O-methyl modified nucleotide
  modified_base 82: mod_base = OTHER; note = 2'-O-methyl modified nucleotide
  modified_base 83: mod_base = OTHER; note = 2'-O-methyl modified nucleotide
  modified_base 84: mod_base = OTHER; note = 2'-O-methyl modified nucleotide
  modified_base 85: mod_base = OTHER; note = 2'-O-methyl modified nucleotide
  modified_base 86: mod_base = OTHER; note = 2'-O-methyl modified nucleotide
  modified_base 87: mod_base = OTHER; note = 2'-O-methyl modified nucleotide
  modified_base 88: mod_base = OTHER; note = 2'-O-methyl modified nucleotide
  modified_base 89: mod_base = OTHER; note = 2'-O-methyl modified nucleotide
  modified_base 90: mod_base = OTHER; note = 2'-O-methyl modified nucleotide
  modified_base 91: mod_base = OTHER; note = 2'-O-methyl modified nucleotide
  modified_base 92: mod_base = OTHER; note = 2'-O-methyl modified nucleotide
  modified_base 93: mod_base = OTHER; note = 2'-O-methyl modified nucleotide
  modified_base 94: mod_base = OTHER; note = 2'-O-methyl modified nucleotide
  modified_base 95: mod_base = OTHER; note = 2'-O-methyl modified nucleotide
  modified_base 96: mod_base = OTHER; note = 2'-O-methyl modified nucleotide
  modified_base 122: mod_base = OTHER; note = Nucleotide with phosphorothioate linkage
  modified_base 123: mod_base = OTHER; note = 2'-O-methyl modified nucleotide with phosphorothioate linkage
  modified_base 124: mod_base = OTHER; note = 2'-O-methyl modified nucleotide with phosphorothioate linkage
  modified_base 125: mod_base = OTHER; note = 2'-O-methyl modified nucleotide
gagaatcaaaatcggtgaatgttttagagctagaaatagcaagttaaaataaggctagtccgttatcaacttgaaaaagtggcaccgagtcggtgcagtgacaagtctgtcattcaccgattttg

SEQ ID NO: 16286 - RNA, 124 nt, synthetic construct
  source 1..124: mol_type = other RNA
  modified_base 1: mod_base = OTHER; note = 2'-O-methyl modified nucleotide with phosphorothioate linkage
  modified_base 2: mod_base = OTHER; note = 2'-O-methyl modified nucleotide with phosphorothioate linkage
  modified_base 3: mod_base = OTHER; note = 2'-O-methyl modified nucleotide with phosphorothioate linkage
  modified_base 29: mod_base = OTHER; note = 2'-O-methyl modified nucleotide
  modified_base 30: mod_base = OTHER; note = 2'-O-methyl modified nucleotide
  modified_base 31: mod_base = OTHER; note = 2'-O-methyl modified nucleotide
  modified_base 32: mod_base = OTHER; note = 2'-O-methyl modified nucleotide
  modified_base 33: mod_base = OTHER; note = 2'-O-methyl modified nucleotide
  modified_base 34: mod_base = OTHER; note = 2'-O-methyl modified nucleotide
  modified_base 35: mod_base = OTHER; note = 2'-O-methyl modified nucleotide
  modified_base 36: mod_base = OTHER; note = 2'-O-methyl modified nucleotide
  modified_base 37: mod_base = OTHER; note = 2'-O-methyl modified nucleotide
  modified_base 38: mod_base = OTHER; note = 2'-O-methyl modified nucleotide
  modified_base 39: mod_base = OTHER; note = 2'-O-methyl modified nucleotide
  modified_base 40: mod_base = OTHER; note = 2'-O-methyl modified nucleotide
  modified_base 69: mod_base = OTHER; note = 2'-O-methyl modified nucleotide
  modified_base 70: mod_base = OTHER; note = 2'-O-methyl modified nucleotide
  modified_base 71: mod_base = OTHER; note = 2'-O-methyl modified nucleotide
  modified_base 72: mod_base = OTHER; note = 2'-O-methyl modified nucleotide
  modified_base 73: mod_base = OTHER; note = 2'-O-methyl modified nucleotide
  modified_base 74: mod_base = OTHER; note = 2'-O-methyl modified nucleotide
  modified_base 75: mod_base = OTHER; note = 2'-O-methyl modified nucleotide
  modified_base 76: mod_base = OTHER; note = 2'-O-methyl modified nucleotide
  modified_base 77: mod_base = OTHER; note = 2'-O-methyl modified nucleotide
  modified_base 78: mod_base = OTHER; note = 2'-O-methyl modified nucleotide
  modified_base 79: mod_base = OTHER; note = 2'-O-methyl modified nucleotide
  modified_base 80: mod_base = OTHER; note = 2'-O-methyl modified nucleotide
  modified_base 81: mod_base = OTHER; note = 2'-O-methyl modified nucleotide
  modified_base 82: mod_base = OTHER; note = 2'-O-methyl modified nucleotide
  modified_base 83: mod_base = OTHER; note = 2'-O-methyl modified nucleotide
  modified_base 84: mod_base = OTHER; note = 2'-O-methyl modified nucleotide
  modified_base 85: mod_base = OTHER; note = 2'-O-methyl modified nucleotide
  modified_base 86: mod_base = OTHER; note = 2'-O-methyl modified nucleotide
  modified_base 87: mod_base = OTHER; note = 2'-O-methyl modified nucleotide
  modified_base 88: mod_base = OTHER; note = 2'-O-methyl modified nucleotide
  modified_base 89: mod_base = OTHER; note = 2'-O-methyl modified nucleotide
  modified_base 90: mod_base = OTHER; note = 2'-O-methyl modified nucleotide
  modified_base 91: mod_base = OTHER; note = 2'-O-methyl modified nucleotide
  modified_base 92: mod_base = OTHER; note = 2'-O-methyl modified nucleotide
  modified_base 93: mod_base = OTHER; note = 2'-O-methyl modified nucleotide
  modified_base 94: mod_base = OTHER; note = 2'-O-methyl modified nucleotide
  modified_base 95: mod_base = OTHER; note = 2'-O-methyl modified nucleotide
  modified_base 96: mod_base = OTHER; note = 2'-O-methyl modified nucleotide
  modified_base 121: mod_base = OTHER; note = Nucleotide with phosphorothioate linkage
  modified_base 122: mod_base = OTHER; note = 2'-O-methyl modified nucleotide with phosphorothioate linkage
  modified_base 123: mod_base = OTHER; note = 2'-O-methyl modified nucleotide with phosphorothioate linkage
  modified_base 124: mod_base = OTHER; note = 2'-O-methyl modified nucleotide
gagaatcaaaatcggtgaatgttttagagctagaaatagcaagttaaaataaggctagtccgttatcaacttgaaaaagtggcaccgagtcggtgcagtgacaagtctgtcattcaccgatttt

SEQ ID NO: 16287 - RNA, 123 nt, synthetic construct
  source 1..123: mol_type = other RNA
  modified_base 1: mod_base = OTHER; note = 2'-O-methyl modified nucleotide with phosphorothioate linkage
  modified_base 2: mod_base = OTHER; note = 2'-O-methyl modified nucleotide with phosphorothioate linkage
  modified_base 3: mod_base = OTHER; note = 2'-O-methyl modified nucleotide with phosphorothioate linkage
  modified_base 29: mod_base = OTHER; note = 2'-O-methyl modified nucleotide
  modified_base 30: mod_base = OTHER; note = 2'-O-methyl modified nucleotide
  modified_base 31: mod_base = OTHER; note = 2'-O-methyl modified nucleotide
  modified_base 32: mod_base = OTHER; note = 2'-O-methyl modified nucleotide
  modified_base 33: mod_base = OTHER; note = 2'-O-methyl modified nucleotide
  modified_base 34: mod_base = OTHER; note = 2'-O-methyl modified nucleotide
  modified_base 35: mod_base = OTHER; note = 2'-O-methyl modified nucleotide
  modified_base 36: mod_base = OTHER; note = 2'-O-methyl modified nucleotide
  modified_base 37: mod_base = OTHER; note = 2'-O-methyl modified nucleotide
  modified_base 38: mod_base = OTHER; note = 2'-O-methyl modified nucleotide
  modified_base 39: mod_base = OTHER; note = 2'-O-methyl modified nucleotide
  modified_base 40: mod_base = OTHER; note = 2'-O-methyl modified nucleotide
  modified_base 69: mod_base = OTHER; note = 2'-O-methyl modified nucleotide
  modified_base 70: mod_base = OTHER; note = 2'-O-methyl modified nucleotide
  modified_base 71: mod_base = OTHER; note = 2'-O-methyl modified nucleotide
  modified_base 72: mod_base = OTHER; note = 2'-O-methyl modified nucleotide
  modified_base 73: mod_base = OTHER; note = 2'-O-methyl modified nucleotide
  modified_base 74: mod_base = OTHER; note = 2'-O-methyl modified nucleotide
  modified_base 75: mod_base = OTHER; note = 2'-O-methyl modified nucleotide
  modified_base 76: mod_base = OTHER; note = 2'-O-methyl modified nucleotide
  modified_base 77: mod_base = OTHER; note = 2'-O-methyl modified nucleotide
  modified_base 78: mod_base = OTHER; note = 2'-O-methyl modified nucleotide
  modified_base 79: mod_base = OTHER; note = 2'-O-methyl modified nucleotide
  modified_base 80: mod_base = OTHER; note = 2'-O-methyl modified nucleotide
  modified_base 81: mod_base = OTHER; note = 2'-O-methyl modified nucleotide
  modified_base 82: mod_base = OTHER; note = 2'-O-methyl modified nucleotide
  modified_base 83: mod_base = OTHER; note = 2'-O-methyl modified nucleotide
  modified_base 84: mod_base = OTHER; note = 2'-O-methyl modified nucleotide
  modified_base 85: mod_base = OTHER; note = 2'-O-methyl modified nucleotide
  modified_base 86: mod_base = OTHER; note = 2'-O-methyl modified nucleotide
  modified_base 87: mod_base = OTHER; note = 2'-O-methyl modified nucleotide
  modified_base 88: mod_base = OTHER; note = 2'-O-methyl modified nucleotide
  modified_base 89: mod_base = OTHER; note = 2'-O-methyl modified nucleotide
  modified_base 90: mod_base = OTHER; note = 2'-O-methyl modified nucleotide
  modified_base 91: mod_base = OTHER; note = 2'-O-methyl modified nucleotide
  modified_base 92: mod_base = OTHER; note = 2'-O-methyl modified nucleotide
  modified_base 93: mod_base = OTHER; note = 2'-O-methyl modified nucleotide
  modified_base 94: mod_base = OTHER; note = 2'-O-methyl modified nucleotide
  modified_base 95: mod_base = OTHER; note = 2'-O-methyl modified nucleotide
  modified_base 96: mod_base = OTHER; note = 2'-O-methyl modified nucleotide
  modified_base 120: mod_base = OTHER; note = Nucleotide with phosphorothioate linkage
  modified_base 121: mod_base = OTHER; note = 2'-O-methyl modified nucleotide with phosphorothioate linkage
  modified_base 122: mod_base = OTHER; note = 2'-O-methyl modified nucleotide with phosphorothioate linkage
  modified_base 123: mod_base = OTHER; note = 2'-O-methyl modified nucleotide
gagaatcaaaatcggtgaatgttttagagctagaaatagcaagttaaaataaggctagtccgttatcaacttgaaaaagtggcaccgagtcggtgcagtgacaagtctgtcattcaccgattt

SEQ ID NO: 16288 - RNA, 122 nt, synthetic construct
  source 1..122: mol_type = other RNA
  modified_base 1: mod_base = OTHER; note = 2'-O-methyl modified nucleotide with phosphorothioate linkage
  modified_base 2: mod_base = OTHER; note = 2'-O-methyl modified nucleotide with phosphorothioate linkage
  modified_base 3: mod_base = OTHER; note = 2'-O-methyl modified nucleotide with phosphorothioate linkage
  modified_base 29: mod_base = OTHER; note = 2'-O-methyl modified nucleotide
  modified_base 30: mod_base = OTHER; note = 2'-O-methyl modified nucleotide
  modified_base 31: mod_base = OTHER; note = 2'-O-methyl modified nucleotide
  modified_base 32: mod_base = OTHER; note = 2'-O-methyl modified nucleotide
  modified_base 33: mod_base = OTHER; note = 2'-O-methyl modified nucleotide
  modified_base 34: mod_base = OTHER; note = 2'-O-methyl modified nucleotide
  modified_base 35: mod_base = OTHER; note = 2'-O-methyl modified nucleotide
  modified_base 36: mod_base = OTHER; note = 2'-O-methyl modified nucleotide
  modified_base 37: mod_base = OTHER; note = 2'-O-methyl modified nucleotide
  modified_base 38: mod_base = OTHER; note = 2'-O-methyl modified nucleotide
  modified_base 39: mod_base = OTHER; note = 2'-O-methyl modified nucleotide
  modified_base 40: mod_base = OTHER; note = 2'-O-methyl modified nucleotide
  modified_base 69: mod_base = OTHER; note = 2'-O-methyl modified nucleotide
  modified_base 70: mod_base = OTHER; note = 2'-O-methyl modified nucleotide
  modified_base 71: mod_base = OTHER; note = 2'-O-methyl modified nucleotide
  modified_base 72: mod_base = OTHER; note = 2'-O-methyl modified nucleotide
  modified_base 73: mod_base = OTHER; note = 2'-O-methyl modified nucleotide
  modified_base 74: mod_base = OTHER; note = 2'-O-methyl modified nucleotide
  modified_base 75: mod_base = OTHER; note = 2'-O-methyl modified nucleotide
  modified_base 76: mod_base = OTHER; note = 2'-O-methyl modified nucleotide
  modified_base 77: mod_base = OTHER; note = 2'-O-methyl modified nucleotide
  modified_base 78: mod_base = OTHER; note = 2'-O-methyl modified nucleotide
  modified_base 79: mod_base = OTHER; note = 2'-O-methyl modified nucleotide
  modified_base 80: mod_base = OTHER; note = 2'-O-methyl modified nucleotide
  modified_base 81: mod_base = OTHER; note = 2'-O-methyl modified nucleotide
  modified_base 82: mod_base = OTHER; note = 2'-O-methyl modified nucleotide
  modified_base 83: mod_base = OTHER; note = 2'-O-methyl modified nucleotide
  modified_base 84: mod_base = OTHER; note = 2'-O-methyl modified nucleotide
  modified_base 85: mod_base = OTHER; note = 2'-O-methyl modified nucleotide
  modified_base 86: mod_base = OTHER; note = 2'-O-methyl modified nucleotide
  modified_base 87: mod_base = OTHER; note = 2'-O-methyl modified nucleotide
  modified_base 88: mod_base = OTHER; note = 2'-O-methyl modified nucleotide
  modified_base 89: mod_base = OTHER; note = 2'-O-methyl modified nucleotide
  modified_base 90: mod_base = OTHER; note = 2'-O-methyl modified nucleotide
  modified_base 91: mod_base = OTHER; note = 2'-O-methyl modified nucleotide
  modified_base 92: mod_base = OTHER; note = 2'-O-methyl modified nucleotide
  modified_base 93: mod_base = OTHER; note = 2'-O-methyl modified nucleotide
  modified_base 94: mod_base = OTHER; note = 2'-O-methyl modified nucleotide
  modified_base 95: mod_base = OTHER; note = 2'-O-methyl modified nucleotide
  modified_base 96: mod_base = OTHER; note = 2'-O-methyl modified nucleotide
  modified_base 119: mod_base = OTHER; note = Nucleotide with phosphorothioate linkage
  modified_base 120: mod_base = OTHER; note = 2'-O-methyl modified nucleotide with phosphorothioate linkage
  modified_base 121: mod_base = OTHER; note = 2'-O-methyl modified nucleotide with phosphorothioate linkage
  modified_base 122: mod_base = OTHER; note = 2'-O-methyl modified nucleotide
gagaatcaaaatcggtgaatgttttagagctagaaatagcaagttaaaataaggctagtccgttatcaacttgaaaaagtggcaccgagtcggtgcagtgacaagtctgtcattcaccgatt

SEQ ID NO: 16289 - RNA, 129 nt, synthetic construct
  source 1..129: mol_type = other RNA
  modified_base 1: mod_base = OTHER; note = 2'-O-methyl modified nucleotide with phosphorothioate linkage
  modified_base 2: mod_base = OTHER; note = 2'-O-methyl modified nucleotide with phosphorothioate linkage
  modified_base 3: mod_base = OTHER; note = 2'-O-methyl modified nucleotide with phosphorothioate linkage
  modified_base 29: mod_base = OTHER; note = 2'-O-methyl modified nucleotide
  modified_base 30: mod_base = OTHER; note = 2'-O-methyl modified nucleotide
  modified_base 31: mod_base = OTHER; note = 2'-O-methyl modified nucleotide
  modified_base 32: mod_base = OTHER; note = 2'-O-methyl modified nucleotide
  modified_base 33: mod_base = OTHER; note = 2'-O-methyl modified nucleotide
  modified_base 34: mod_base = OTHER; note = 2'-O-methyl modified nucleotide
  modified_base 35: mod_base = OTHER; note = 2'-O-methyl modified nucleotide
  modified_base 36: mod_base = OTHER; note = 2'-O-methyl modified nucleotide
  modified_base 37: mod_base = OTHER; note = 2'-O-methyl modified nucleotide
  modified_base 38: mod_base = OTHER; note = 2'-O-methyl modified nucleotide
  modified_base 39: mod_base = OTHER; note = 2'-O-methyl modified nucleotide
  modified_base 40: mod_base = OTHER; note = 2'-O-methyl modified nucleotide
  modified_base 69: mod_base = OTHER; note = 2'-O-methyl modified nucleotide
  modified_base 70: mod_base = OTHER; note = 2'-O-methyl modified nucleotide
  modified_base 71: mod_base = OTHER; note = 2'-O-methyl modified nucleotide
  modified_base 72: mod_base = OTHER; note = 2'-O-methyl modified nucleotide
  modified_base 73: mod_base = OTHER; note = 2'-O-methyl modified nucleotide
  modified_base 74: mod_base = OTHER; note = 2'-O-methyl modified nucleotide
  modified_base 75: mod_base = OTHER; note = 2'-O-methyl modified nucleotide
  modified_base 76: mod_base = OTHER; note = 2'-O-methyl modified nucleotide
  modified_base 77: mod_base = OTHER; note = 2'-O-methyl modified nucleotide
  modified_base 78: mod_base = OTHER; note = 2'-O-methyl modified nucleotide
  modified_base 79: mod_base = OTHER; note = 2'-O-methyl modified nucleotide
  modified_base 80: mod_base = OTHER; note = 2'-O-methyl modified nucleotide
  modified_base 81: mod_base = OTHER; note = 2'-O-methyl modified nucleotide
  modified_base 82: mod_base = OTHER; note = 2'-O-methyl modified nucleotide
  modified_base 83: mod_base = OTHER; note = 2'-O-methyl modified nucleotide
  modified_base 84: mod_base = OTHER; note = 2'-O-methyl modified nucleotide
  modified_base 85: mod_base = OTHER; note = 2'-O-methyl modified nucleotide
  modified_base 86: mod_base = OTHER; note = 2'-O-methyl modified nucleotide
  modified_base 87: mod_base = OTHER; note = 2'-O-methyl modified nucleotide
  modified_base 88: mod_base = OTHER; note = 2'-O-methyl modified nucleotide
  modified_base 89: mod_base = OTHER; note = 2'-O-methyl modified nucleotide
  modified_base 90: mod_base = OTHER; note = 2'-O-methyl modified nucleotide
  modified_base 91: mod_base = OTHER; note = 2'-O-methyl modified nucleotide
  modified_base 92: mod_base = OTHER; note = 2'-O-methyl modified nucleotide
  modified_base 93: mod_base = OTHER; note = 2'-O-methyl modified nucleotide
  modified_base 94: mod_base = OTHER; note = 2'-O-methyl modified nucleotide
  modified_base 95: mod_base = OTHER; note = 2'-O-methyl modified nucleotide
  modified_base 96: mod_base = OTHER; note = 2'-O-methyl modified nucleotide
  modified_base 126: mod_base = OTHER; note = Nucleotide with phosphorothioate linkage
  modified_base 127: mod_base = OTHER; note = 2'-O-methyl modified nucleotide with phosphorothioate linkage
  modified_base 128: mod_base = OTHER; note = 2'-O-methyl modified nucleotide with phosphorothioate linkage
  modified_base 129: mod_base = OTHER; note = 2'-O-methyl modified nucleotide
gagaatcaaaatcggtgaatgttttagagctagaaatagcaagttaaaataaggctagtccgttatcaacttgaaaaagtggcaccgagtcggtgcccagtgacaagtctgtcattcaccgattttgat

SEQ ID NO: 16290 - RNA, 128 nt, synthetic construct
  source 1..128: mol_type = other RNA
  modified_base 1: mod_base = OTHER; note = 2'-O-methyl modified nucleotide with phosphorothioate linkage
  modified_base 2: mod_base = OTHER; note = 2'-O-methyl modified nucleotide with phosphorothioate linkage
  modified_base 3: mod_base = OTHER; note = 2'-O-methyl modified nucleotide with phosphorothioate linkage
  modified_base 29: mod_base = OTHER; note = 2'-O-methyl modified nucleotide
  modified_base 30: mod_base = OTHER; note = 2'-O-methyl modified nucleotide
  modified_base 31: mod_base = OTHER; note = 2'-O-methyl modified nucleotide
  modified_base 32: mod_base = OTHER; note = 2'-O-methyl modified nucleotide
  modified_base 33: mod_base = OTHER; note = 2'-O-methyl modified nucleotide
  modified_base 34: mod_base = OTHER; note = 2'-O-methyl modified nucleotide
  modified_base 35: mod_base = OTHER; note = 2'-O-methyl modified nucleotide
  modified_base 36: mod_base = OTHER; note = 2'-O-methyl modified nucleotide
  modified_base 37: mod_base = OTHER; note = 2'-O-methyl modified nucleotide
  modified_base 38: mod_base = OTHER; note = 2'-O-methyl modified nucleotide
  modified_base 39: mod_base = OTHER; note = 2'-O-methyl modified nucleotide
  modified_base 40: mod_base = OTHER; note = 2'-O-methyl modified nucleotide
  modified_base 69: mod_base = OTHER; note = 2'-O-methyl modified nucleotide
  modified_base 70: mod_base = OTHER; note = 2'-O-methyl modified nucleotide
  modified_base 71: mod_base = OTHER; note = 2'-O-methyl modified nucleotide
  modified_base 72: mod_base = OTHER; note = 2'-O-methyl modified nucleotide
  modified_base 73: mod_base = OTHER; note = 2'-O-methyl modified nucleotide
  modified_base 74: mod_base = OTHER; note = 2'-O-methyl modified nucleotide
  modified_base 75: mod_base = OTHER; note = 2'-O-methyl modified nucleotide
  modified_base 76: mod_base = OTHER; note = 2'-O-methyl modified nucleotide
  modified_base 77: mod_base = OTHER; note = 2'-O-methyl modified nucleotide
  modified_base 78: mod_base = OTHER; note = 2'-O-methyl modified nucleotide
  modified_base 79: mod_base = OTHER; note = 2'-O-methyl modified nucleotide
  modified_base 80: mod_base = OTHER; note = 2'-O-methyl modified nucleotide
  modified_base 81: mod_base = OTHER; note = 2'-O-methyl modified nucleotide
  modified_base 82: mod_base = OTHER; note = 2'-O-methyl modified nucleotide
  modified_base 83: mod_base = OTHER; note = 2'-O-methyl modified nucleotide
  modified_base 84: mod_base = OTHER; note = 2'-O-methyl modified nucleotide
  modified_base 85: mod_base = OTHER; note = 2'-O-methyl modified nucleotide
  modified_base 86: mod_base = OTHER; note = 2'-O-methyl modified nucleotide
  modified_base 87: mod_base = OTHER; note = 2'-O-methyl modified nucleotide
  modified_base 88: mod_base = OTHER; note = 2'-O-methyl modified nucleotide
  modified_base 89: mod_base = OTHER; note = 2'-O-methyl modified nucleotide
  modified_base 90: mod_base = OTHER; note = 2'-O-methyl modified nucleotide
  modified_base 91: mod_base = OTHER; note = 2'-O-methyl modified nucleotide
  modified_base 92: mod_base = OTHER; note = 2'-O-methyl modified nucleotide
  modified_base 93: mod_base = OTHER; note = 2'-O-methyl modified nucleotide
  modified_base 94: mod_base = OTHER; note = 2'-O-methyl modified nucleotide
  modified_base 95: mod_base = OTHER; note = 2'-O-methyl modified nucleotide
  modified_base 96: mod_base = OTHER; note = 2'-O-methyl modified nucleotide
  modified_base 125: mod_base = OTHER; note = Nucleotide with phosphorothioate linkage
  modified_base 126: mod_base = OTHER; note = 2'-O-methyl modified nucleotide with phosphorothioate linkage
  modified_base 127: mod_base = OTHER; note = 2'-O-methyl modified nucleotide with phosphorothioate linkage
  modified_base 128: mod_base = OTHER; note = 2'-O-methyl modified nucleotide
gagaatcaaaatcggtgaatgttttagagctagaaatagcaagttaaaataaggctagtccgttatcaacttgaaaaagtggcaccgagtcggtgcccagtgacaagtctgtcattcaccgattttga

SEQ ID NO: 16291 - RNA, 127 nt, synthetic construct
  source 1..127: mol_type = other RNA
  modified_base 1: mod_base = OTHER; note = 2'-O-methyl modified nucleotide with phosphorothioate linkage
  modified_base 2: mod_base = OTHER; note = 2'-O-methyl modified nucleotide with phosphorothioate linkage
  modified_base 3: mod_base = OTHER; note = 2'-O-methyl modified nucleotide with phosphorothioate linkage
  modified_base 29: mod_base = OTHER; note = 2'-O-methyl modified nucleotide
  modified_base 30: mod_base = OTHER; note = 2'-O-methyl modified nucleotide
  modified_base 31: mod_base = OTHER; note = 2'-O-methyl modified nucleotide
  modified_base 32: mod_base = OTHER; note = 2'-O-methyl modified nucleotide
  modified_base 33: mod_base = OTHER; note = 2'-O-methyl modified nucleotide
  modified_base 34: mod_base = OTHER; note = 2'-O-methyl modified nucleotide
  modified_base 35: mod_base = OTHER; note = 2'-O-methyl modified nucleotide
  modified_base 36: mod_base = OTHER; note = 2'-O-methyl modified nucleotide
  modified_base 37: mod_base = OTHER; note = 2'-O-methyl modified nucleotide
  modified_base 38: mod_base = OTHER; note = 2'-O-methyl modified nucleotide
  modified_base 39: mod_base = OTHER; note = 2'-O-methyl modified nucleotide
  modified_base 40: mod_base = OTHER; note = 2'-O-methyl modified nucleotide
  modified_base 69: mod_base = OTHER; note = 2'-O-methyl modified nucleotide
  modified_base 70: mod_base = OTHER; note = 2'-O-methyl modified nucleotide
  modified_base 71: mod_base = OTHER; note = 2'-O-methyl modified nucleotide
  modified_base 72: mod_base = OTHER; note = 2'-O-methyl modified nucleotide
  modified_base 73: mod_base = OTHER; note = 2'-O-methyl modified nucleotide
  modified_base 74: mod_base = OTHER; note = 2'-O-methyl modified nucleotide
  modified_base 75: mod_base = OTHER; note = 2'-O-methyl modified nucleotide
  modified_base 76: mod_base = OTHER; note = 2'-O-methyl modified nucleotide
  modified_base 77: mod_base = OTHER; note = 2'-O-methyl modified nucleotide
  modified_base 78: mod_base = OTHER; note = 2'-O-methyl modified nucleotide
  modified_base 79: mod_base = OTHER; note = 2'-O-methyl modified nucleotide
  modified_base 80: mod_base = OTHER; note = 2'-O-methyl modified nucleotide
  modified_base 81: mod_base = OTHER; note = 2'-O-methyl modified nucleotide
  modified_base 82: mod_base = OTHER; note = 2'-O-methyl modified nucleotide
  modified_base 83: mod_base = OTHER; note = 2'-O-methyl modified nucleotide
  modified_base 84: mod_base = OTHER; note = 2'-O-methyl modified nucleotide
  modified_base 85: mod_base = OTHER; note = 2'-O-methyl modified nucleotide
  modified_base 86: mod_base = OTHER; note = 2'-O-methyl modified nucleotide
  modified_base 87: mod_base = OTHER; note = 2'-O-methyl modified nucleotide
  modified_base 88: mod_base = OTHER; note = 2'-O-methyl modified nucleotide
  modified_base 89: mod_base = OTHER; note = 2'-O-methyl modified nucleotide
  modified_base 90: mod_base = OTHER; note = 2'-O-methyl modified nucleotide
  modified_base 91: mod_base = OTHER; note = 2'-O-methyl modified nucleotide
  modified_base 92: mod_base = OTHER; note = 2'-O-methyl modified nucleotide
  modified_base 93: mod_base = OTHER; note = 2'-O-methyl modified nucleotide
  modified_base 94: mod_base = OTHER; note = 2'-O-methyl modified nucleotide
  modified_base 95: mod_base = OTHER; note = 2'-O-methyl modified nucleotide
  modified_base 96: mod_base = OTHER; note = 2'-O-methyl modified nucleotide
  modified_base 124: mod_base = OTHER; note = Nucleotide with phosphorothioate linkage
  modified_base 125: mod_base = OTHER; note = 2'-O-methyl modified nucleotide with phosphorothioate linkage
  modified_base 126: mod_base = OTHER; note = 2'-O-methyl modified nucleotide with phosphorothioate linkage
  modified_base 127: mod_base = OTHER; note = 2'-O-methyl modified nucleotide
gagaatcaaaatcggtgaatgttttagagctagaaatagcaagttaaaataaggctagtccgttatcaacttgaaaaagtggcaccgagtcggtgcccagtgacaagtctgtcattcaccgattttg

SEQ ID NO: 16292 - RNA, 126 nt, synthetic construct
  source 1..126: mol_type = other RNA
  modified_base 1: mod_base = OTHER; note = 2'-O-methyl modified nucleotide with phosphorothioate linkage
  modified_base 2: mod_base = OTHER; note = 2'-O-methyl modified nucleotide with phosphorothioate linkage
  modified_base 3: mod_base = OTHER; note = 2'-O-methyl modified nucleotide with phosphorothioate linkage
  modified_base 29: mod_base = OTHER; note = 2'-O-methyl modified nucleotide
  modified_base 30: mod_base = OTHER; note = 2'-O-methyl modified nucleotide
  modified_base 31: mod_base = OTHER; note = 2'-O-methyl modified nucleotide
  modified_base 32: mod_base = OTHER; note = 2'-O-methyl modified nucleotide
  modified_base 33: mod_base = OTHER; note = 2'-O-methyl modified nucleotide
  modified_base 34: mod_base = OTHER; note = 2'-O-methyl modified nucleotide
  modified_base 35: mod_base = OTHER; note = 2'-O-methyl modified nucleotide
  modified_base 36: mod_base = OTHER; note = 2'-O-methyl modified nucleotide
  modified_base 37: mod_base = OTHER; note = 2'-O-methyl modified nucleotide
  modified_base 38: mod_base = OTHER; note = 2'-O-methyl modified nucleotide
  modified_base 39: mod_base = OTHER; note = 2'-O-methyl modified nucleotide
  modified_base 40: mod_base = OTHER; note = 2'-O-methyl modified nucleotide
  modified_base 69: mod_base = OTHER; note = 2'-O-methyl modified nucleotide
  modified_base 70: mod_base = OTHER; note = 2'-O-methyl modified nucleotide
  modified_base 71: mod_base = OTHER; note = 2'-O-methyl modified nucleotide
  modified_base 72: mod_base = OTHER; note = 2'-O-methyl modified nucleotide
  modified_base 73: mod_base = OTHER; note = 2'-O-methyl modified nucleotide
  modified_base 74: mod_base = OTHER; note = 2'-O-methyl modified nucleotide
  modified_base 75: mod_base = OTHER; note = 2'-O-methyl modified nucleotide
  modified_base 76: mod_base = OTHER; note = 2'-O-methyl modified nucleotide
  modified_base 77: mod_base = OTHER; note = 2'-O-methyl modified nucleotide
  modified_base 78: mod_base = OTHER; note = 2'-O-methyl modified nucleotide
  modified_base 79: mod_base = OTHER; note = 2'-O-methyl modified nucleotide
  modified_base 80: mod_base = OTHER; note = 2'-O-methyl modified nucleotide
  modified_base 81: mod_base = OTHER; note = 2'-O-methyl modified nucleotide
  modified_base 82: mod_base = OTHER; note = 2'-O-methyl modified nucleotide
  modified_base 83: mod_base = OTHER; note = 2'-O-methyl modified nucleotide
  modified_base 84: mod_base = OTHER; note = 2'-O-methyl modified nucleotide
  modified_base 85: mod_base = OTHER; note = 2'-O-methyl modified nucleotide
  modified_base 86: mod_base = OTHER; note = 2'-O-methyl modified nucleotide
  modified_base 87: mod_base = OTHER; note = 2'-O-methyl modified nucleotide
  modified_base 88: mod_base = OTHER; note = 2'-O-methyl modified nucleotide
  modified_base 89: mod_base = OTHER; note = 2'-O-methyl modified nucleotide
  modified_base 90: mod_base = OTHER; note = 2'-O-methyl modified nucleotide
  modified_base 91: mod_base = OTHER; note = 2'-O-methyl modified nucleotide
  modified_base 92: mod_base = OTHER; note = 2'-O-methyl modified nucleotide
  modified_base 93: mod_base = OTHER; note = 2'-O-methyl modified nucleotide
  modified_base 94: mod_base = OTHER; note = 2'-O-methyl modified nucleotide
  modified_base 95: mod_base = OTHER; note = 2'-O-methyl modified nucleotide
  modified_base 96: mod_base = OTHER; note = 2'-O-methyl modified nucleotide
  modified_base 123: mod_base = OTHER; note = Nucleotide with phosphorothioate linkage
  modified_base 124: mod_base = OTHER; note = 2'-O-methyl modified nucleotide with phosphorothioate linkage
  modified_base 125: mod_base = OTHER; note = 2'-O-methyl modified nucleotide with phosphorothioate linkage
  modified_base 126: mod_base = OTHER; note = 2'-O-methyl modified nucleotide
gagaatcaaaatcggtgaatgttttagagctagaaatagcaagttaaaataaggctagtccgttatcaacttgaaaaagtggcaccgagtcggtgcccagtgacaagtctgtcattcaccgatttt

SEQ ID NO: 16293 - RNA, 125 nt, synthetic construct
  source 1..125: mol_type = other RNA
  modified_base 1: mod_base = OTHER; note = 2'-O-methyl modified nucleotide with phosphorothioate linkage
  modified_base 2: mod_base = OTHER; note = 2'-O-methyl modified nucleotide with phosphorothioate linkage
  modified_base 3: mod_base = OTHER; note = 2'-O-methyl modified nucleotide with phosphorothioate linkage
  modified_base 29: mod_base = OTHER; note = 2'-O-methyl modified nucleotide
  modified_base 30: mod_base = OTHER; note = 2'-O-methyl modified nucleotide
  modified_base 31: mod_base = OTHER; note = 2'-O-methyl modified nucleotide
  modified_base 32: mod_base = OTHER; note = 2'-O-methyl modified nucleotide
  modified_base 33: mod_base = OTHER; note = 2'-O-methyl modified nucleotide
  modified_base 34: mod_base = OTHER; note = 2'-O-methyl modified nucleotide
  modified_base 35: mod_base = OTHER; note = 2'-O-methyl modified nucleotide
  modified_base 36: mod_base = OTHER; note = 2'-O-methyl modified nucleotide
  modified_base 37: mod_base = OTHER; note = 2'-O-methyl modified nucleotide
  modified_base 38: mod_base = OTHER; note = 2'-O-methyl modified nucleotide
  modified_base 39: mod_base = OTHER; note = 2'-O-methyl modified nucleotide
  modified_base 40: mod_base = OTHER; note = 2'-O-methyl modified nucleotide
  modified_base 69: mod_base = OTHER; note = 2'-O-methyl modified nucleotide
  modified_base 70: mod_base = OTHER; note = 2'-O-methyl modified nucleotide
  modified_base 71: mod_base = OTHER; note = 2'-O-methyl modified nucleotide
  modified_base 72: mod_base = OTHER; note = 2'-O-methyl modified nucleotide
  modified_base 73: mod_base = OTHER; note = 2'-O-methyl modified nucleotide
  modified_base 74: mod_base = OTHER; note = 2'-O-methyl modified nucleotide
  modified_base 75: mod_base = OTHER; note = 2'-O-methyl modified nucleotide
  modified_base 76: mod_base = OTHER; note = 2'-O-methyl modified nucleotide
  modified_base 77: mod_base = OTHER; note = 2'-O-methyl modified nucleotide
  modified_base 78: mod_base = OTHER; note = 2'-O-methyl modified nucleotide
  modified_base 79: mod_base = OTHER; note = 2'-O-methyl modified nucleotide
  modified_base 80: mod_base = OTHER; note = 2'-O-methyl modified nucleotide
  modified_base 81: mod_base = OTHER; note = 2'-O-methyl modified nucleotide
  modified_base 82: mod_base = OTHER; note = 2'-O-methyl modified nucleotide
  modified_base 83: mod_base = OTHER; note = 2'-O-methyl modified nucleotide
  modified_base 84: mod_base = OTHER; note = 2'-O-methyl modified nucleotide
  modified_base 85: mod_base = OTHER; note = 2'-O-methyl modified nucleotide
  modified_base 86: mod_base = OTHER; note = 2'-O-methyl modified nucleotide
  modified_base 87: mod_base = OTHER; note = 2'-O-methyl modified nucleotide
  modified_base 88: mod_base = OTHER; note = 2'-O-methyl modified nucleotide
  modified_base 89: mod_base = OTHER; note = 2'-O-methyl modified nucleotide
  modified_base 90: mod_base = OTHER; note = 2'-O-methyl modified nucleotide
  modified_base 91: mod_base = OTHER; note = 2'-O-methyl modified nucleotide
  modified_base 92: mod_base = OTHER; note = 2'-O-methyl modified nucleotide
  modified_base 93: mod_base = OTHER; note = 2'-O-methyl modified nucleotide
  modified_base 94: mod_base = OTHER; note = 2'-O-methyl modified nucleotide
  modified_base 95: mod_base = OTHER; note = 2'-O-methyl modified nucleotide
  modified_base 96: mod_base = OTHER; note = 2'-O-methyl modified nucleotide
  modified_base 122: mod_base = OTHER; note = Nucleotide with phosphorothioate linkage
  modified_base 123: mod_base = OTHER; note = 2'-O-methyl modified nucleotide with phosphorothioate linkage
  modified_base 124: mod_base = OTHER; note = 2'-O-methyl modified nucleotide with phosphorothioate linkage
  modified_base 125: mod_base = OTHER; note = 2'-O-methyl modified nucleotide
gagaatcaaaatcggtgaatgttttagagctagaaatagcaagttaaaataaggctagtccgttatcaacttgaaaaagtggcaccgagtcggtgcccagtgacaagtctgtcattcaccgattt

SEQ ID NO: 16294 - RNA, 124 nt, synthetic construct
  source 1..124: mol_type = other RNA
  modified_base 1: mod_base = OTHER; note = 2'-O-methyl modified nucleotide with phosphorothioate linkage
  modified_base 2: mod_base = OTHER; note = 2'-O-methyl modified nucleotide with phosphorothioate linkage
  modified_base 3: mod_base = OTHER; note = 2'-O-methyl modified nucleotide with phosphorothioate linkage
  modified_base 29: mod_base = OTHER; note = 2'-O-methyl modified nucleotide
  modified_base 30: mod_base = OTHER; note = 2'-O-methyl modified nucleotide
  modified_base 31: mod_base = OTHER; note = 2'-O-methyl modified nucleotide
  modified_base 32: mod_base = OTHER; note = 2'-O-methyl modified nucleotide
  modified_base 33: mod_base = OTHER; note = 2'-O-methyl modified nucleotide
  modified_base 34: mod_base = OTHER; note = 2'-O-methyl modified nucleotide
  modified_base 35: mod_base = OTHER; note = 2'-O-methyl modified nucleotide
  modified_base 36: mod_base = OTHER; note = 2'-O-methyl modified nucleotide
  modified_base 37: mod_base = OTHER; note = 2'-O-methyl modified nucleotide
  modified_base 38: mod_base = OTHER; note = 2'-O-methyl modified nucleotide
  modified_base 39: mod_base = OTHER; note = 2'-O-methyl modified nucleotide
  modified_base 40: mod_base = OTHER; note = 2'-O-methyl modified nucleotide
  modified_base 69: mod_base = OTHER; note = 2'-O-methyl modified nucleotide
  modified_base 70: mod_base = OTHER; note = 2'-O-methyl modified nucleotide
  modified_base 71: mod_base = OTHER; note = 2'-O-methyl modified nucleotide
  modified_base 72: mod_base = OTHER; note = 2'-O-methyl modified nucleotide
  modified_base 73: mod_base = OTHER; note = 2'-O-methyl modified nucleotide
  modified_base 74: mod_base = OTHER; note = 2'-O-methyl modified nucleotide
  modified_base 75: mod_base = OTHER; note = 2'-O-methyl modified nucleotide
  modified_base 76: mod_base = OTHER; note = 2'-O-methyl modified nucleotide
  modified_base 77: mod_base = OTHER; note = 2'-O-methyl modified nucleotide
  modified_base 78: mod_base = OTHER; note = 2'-O-methyl modified nucleotide
  modified_base 79: mod_base = OTHER; note = 2'-O-methyl modified nucleotide
  modified_base 80: mod_base = OTHER; note = 2'-O-methyl modified nucleotide
  modified_base 81: mod_base = OTHER; note = 2'-O-methyl modified nucleotide
  modified_base 82: mod_base = OTHER; note = 2'-O-methyl modified nucleotide
  modified_base 83: mod_base = OTHER; note = 2'-O-methyl modified nucleotide
  modified_base 84: mod_base = OTHER; note = 2'-O-methyl modified nucleotide
  modified_base 85: mod_base = OTHER; note = 2'-O-methyl modified nucleotide
  modified_base 86: mod_base = OTHER; note = 2'-O-methyl modified nucleotide
  modified_base 87: mod_base = OTHER; note = 2'-O-methyl modified nucleotide
  modified_base 88: mod_base = OTHER; note = 2'-O-methyl modified nucleotide
  modified_base 89: mod_base = OTHER; note = 2'-O-methyl modified nucleotide
  modified_base 90: mod_base = OTHER; note = 2'-O-methyl modified nucleotide
  modified_base 91: mod_base = OTHER; note = 2'-O-methyl modified nucleotide
  modified_base 92: mod_base = OTHER; note = 2'-O-methyl modified nucleotide
  modified_base 93: mod_base = OTHER; note = 2'-O-methyl modified nucleotide
  modified_base 94: mod_base = OTHER; note = 2'-O-methyl modified nucleotide
  modified_base 95: mod_base = OTHER; note = 2'-O-methyl modified nucleotide
  modified_base 96: mod_base = OTHER; note = 2'-O-methyl modified nucleotide
  modified_base 121: mod_base = OTHER; note = Nucleotide with phosphorothioate linkage
  modified_base 122: mod_base = OTHER; note = 2'-O-methyl modified nucleotide with phosphorothioate linkage
  modified_base 123: mod_base = OTHER; note = 2'-O-methyl modified nucleotide with phosphorothioate linkage
  modified_base 124: mod_base = OTHER; note = 2'-O-methyl modified nucleotide
gagaatcaaaatcggtgaatgttttagagctagaaatagcaagttaaaataaggctagtccgttatcaacttgaaaaagtggcaccgagtcggtgcccagtgacaagtctgtcattcaccgatt

SEQ ID NO: 16295 - RNA, 117 nt, synthetic construct
  source 1..117: mol_type = other RNA
  modified_base 1: mod_base = OTHER; note = 2'-O-methyl modified nucleotide with phosphorothioate linkage
  modified_base 2: mod_base = OTHER; note = 2'-O-methyl modified nucleotide with phosphorothioate linkage
  modified_base 3: mod_base = OTHER; note = 2'-O-methyl modified nucleotide with phosphorothioate linkage
  modified_base 29: mod_base = OTHER; note = 2'-O-methyl modified nucleotide
  modified_base 30: mod_base = OTHER; note = 2'-O-methyl modified nucleotide
  modified_base 31: mod_base = OTHER; note = 2'-O-methyl modified nucleotide
  modified_base 32: mod_base = OTHER; note = 2'-O-methyl modified nucleotide
  modified_base 33: mod_base = OTHER; note = 2'-O-methyl modified nucleotide
  modified_base 34: mod_base = OTHER; note = 2'-O-methyl modified nucleotide
  modified_base 35: mod_base = OTHER; note = 2'-O-methyl modified nucleotide
  modified_base 36: mod_base = OTHER; note = 2'-O-methyl modified nucleotide
  modified_base 37: mod_base = OTHER; note = 2'-O-methyl modified nucleotide
  modified_base 38: mod_base = OTHER; note = 2'-O-methyl modified nucleotide
  modified_base 39: mod_base = OTHER; note = 2'-O-methyl modified nucleotide
  modified_base 40: mod_base = OTHER; note = 2'-O-methyl modified nucleotide
  modified_base 69: mod_base = OTHER; note = 2'-O-methyl modified nucleotide
  modified_base 70: mod_base = OTHER; note = 2'-O-methyl modified nucleotide
  modified_base 71: mod_base = OTHER; note = 2'-O-methyl modified nucleotide
  modified_base 72: mod_base = OTHER; note = 2'-O-methyl modified nucleotide
  modified_base 73: mod_base = OTHER; note = 2'-O-methyl modified nucleotide
  modified_base 74: mod_base = OTHER; note = 2'-O-methyl modified nucleotide
  modified_base 75: mod_base = OTHER; note = 2'-O-methyl modified nucleotide
  modified_base 76: mod_base = OTHER; note = 2'-O-methyl modified nucleotide
  modified_base 77: mod_base = OTHER; note = 2'-O-methyl modified nucleotide
  modified_base 78: mod_base = OTHER; note = 2'-O-methyl modified nucleotide
  modified_base 79: mod_base = OTHER; note = 2'-O-methyl modified nucleotide
  modified_base 80: mod_base = OTHER; note = 2'-O-methyl modified nucleotide
  modified_base 81: mod_base = OTHER; note = 2'-O-methyl modified nucleotide
  modified_base 82: mod_base = OTHER; note = 2'-O-methyl modified nucleotide
  modified_base 83: mod_base = OTHER; note = 2'-O-methyl modified nucleotide
  modified_base 84: mod_base = OTHER; note = 2'-O-methyl modified nucleotide
  modified_base 85: mod_base = OTHER; note = 2'-O-methyl modified nucleotide
  modified_base 86: mod_base = OTHER; note = 2'-O-methyl modified nucleotide
  modified_base 87: mod_base = OTHER; note = 2'-O-methyl modified nucleotide
  modified_base 88: mod_base = OTHER; note = 2'-O-methyl modified nucleotide
  modified_base 89: mod_base = OTHER; note = 2'-O-methyl modified nucleotide
  modified_base 90: mod_base = OTHER; note = 2'-O-methyl modified nucleotide
  modified_base 91: mod_base = OTHER; note = 2'-O-methyl modified nucleotide
  modified_base 92: mod_base = OTHER; note = 2'-O-methyl modified nucleotide
  modified_base 93: mod_base = OTHER; note = 2'-O-methyl modified nucleotide
  modified_base 94: mod_base = OTHER; note = 2'-O-methyl modified nucleotide
  modified_base 95: mod_base = OTHER; note = 2'-O-methyl modified nucleotide
  modified_base 96: mod_base = OTHER; note = 2'-O-methyl modified nucleotide
  modified_base 114: mod_base = OTHER; note = Nucleotide with phosphorothioate linkage
  modified_base 115: mod_base = OTHER; note = 2'-O-methyl modified nucleotide with phosphorothioate linkage
  modified_base 116: mod_base = OTHER; note = 2'-O-methyl modified nucleotide with phosphorothioate linkage
  modified_base 117: mod_base = OTHER; note = 2'-O-methyl modified nucleotide
gagaatcaaaatcggtgaatgttttagagctagaaatagcaagttaaaataaggctagtccgttatcaacttgaaaaagtggcaccgagtcggtgcgtctgattcaccgattttgat

SEQ ID NO: 16296 - RNA, 116 nt, synthetic construct
  source 1..116: mol_type = other RNA
  modified_base 1: mod_base = OTHER; note = 2'-O-methyl modified nucleotide with phosphorothioate linkage
  modified_base 2: mod_base = OTHER; note = 2'-O-methyl modified nucleotide with phosphorothioate linkage
  modified_base 3: mod_base = OTHER; note = 2'-O-methyl modified nucleotide with phosphorothioate linkage
  modified_base 29: mod_base = OTHER; note = 2'-O-methyl modified nucleotide
  modified_base 30: mod_base = OTHER; note = 2'-O-methyl modified nucleotide
  modified_base 31: mod_base = OTHER; note = 2'-O-methyl modified nucleotide
  modified_base 32: mod_base = OTHER; note = 2'-O-methyl modified nucleotide
  modified_base 33: mod_base = OTHER; note = 2'-O-methyl modified nucleotide
  modified_base 34: mod_base = OTHER; note = 2'-O-methyl modified nucleotide
  modified_base 35: mod_base = OTHER; note = 2'-O-methyl modified nucleotide
  modified_base 36: mod_base = OTHER; note = 2'-O-methyl modified nucleotide
  modified_base 37: mod_base = OTHER; note = 2'-O-methyl modified nucleotide
  modified_base 38: mod_base = OTHER; note = 2'-O-methyl modified nucleotide
  modified_base 39: mod_base = OTHER; note = 2'-O-methyl modified nucleotide
  modified_base 40: mod_base = OTHER; note = 2'-O-methyl modified nucleotide
  modified_base 69: mod_base = OTHER; note = 2'-O-methyl modified nucleotide
  modified_base 70: mod_base = OTHER; note = 2'-O-methyl modified nucleotide
  modified_base 71: mod_base = OTHER; note = 2'-O-methyl modified nucleotide
  modified_base 72: mod_base = OTHER; note = 2'-O-methyl modified nucleotide
  modified_base 73: mod_base = OTHER; note = 2'-O-methyl modified nucleotide
  modified_base 74: mod_base = OTHER; note = 2'-O-methyl modified nucleotide
  modified_base 75: mod_base = OTHER; note = 2'-O-methyl modified nucleotide
  modified_base 76: mod_base = OTHER; note = 2'-O-methyl modified nucleotide
  modified_base 77: mod_base = OTHER; note = 2'-O-methyl modified nucleotide
  modified_base 78: mod_base = OTHER; note = 2'-O-methyl modified nucleotide
  modified_base 79: mod_base = OTHER; note = 2'-O-methyl modified nucleotide
  modified_base 80: mod_base = OTHER; note = 2'-O-methyl modified nucleotide
  modified_base 81: mod_base = OTHER; note = 2'-O-methyl modified nucleotide
  modified_base 82: mod_base = OTHER; note = 2'-O-methyl modified nucleotide
  modified_base 83: mod_base = OTHER; note = 2'-O-methyl modified nucleotide
  modified_base 84: mod_base = OTHER; note = 2'-O-methyl modified nucleotide
  modified_base 85: mod_base = OTHER; note = 2'-O-methyl modified nucleotide
  modified_base 86: mod_base = OTHER; note = 2'-O-methyl modified nucleotide
  modified_base 87: mod_base = OTHER; note = 2'-O-methyl modified nucleotide
  modified_base 88: mod_base = OTHER; note = 2'-O-methyl modified nucleotide
  modified_base 89: mod_base = OTHER; note = 2'-O-methyl modified nucleotide
  modified_base 90: mod_base = OTHER; note = 2'-O-methyl modified nucleotide
  modified_base 91: mod_base = OTHER; note = 2'-O-methyl modified nucleotide
  modified_base 92: mod_base = OTHER; note = 2'-O-methyl modified nucleotide
  modified_base 93: mod_base = OTHER; note = 2'-O-methyl modified nucleotide
  modified_base 94: mod_base = OTHER; note = 2'-O-methyl modified nucleotide
  modified_base 95: mod_base = OTHER; note = 2'-O-methyl modified nucleotide
  modified_base 96: mod_base = OTHER; note = 2'-O-methyl modified nucleotide
  modified_base 113: mod_base = OTHER; note = Nucleotide with phosphorothioate linkage
  modified_base 114: mod_base = OTHER; note = 2'-O-methyl modified nucleotide with phosphorothioate linkage
  modified_base 115: mod_base = OTHER; note = 2'-O-methyl modified nucleotide with phosphorothioate linkage
  modified_base 116: mod_base = OTHER; note = 2'-O-methyl modified nucleotide
gagaatcaaaatcggtgaatgttttagagctagaaatagcaagttaaaataaggctagtccgttatcaacttgaaaaagtggcaccgagtcggtgcgtctgattcaccgattttga

SEQ ID NO: 16297 - RNA, 115 nt, synthetic construct
  source 1..115: mol_type = other RNA
  modified_base 1: mod_base = OTHER; note = 2'-O-methyl modified nucleotide with phosphorothioate linkage
  modified_base 2: mod_base = OTHER; note = 2'-O-methyl modified nucleotide with phosphorothioate linkage
  modified_base 3: mod_base = OTHER; note = 2'-O-methyl modified nucleotide with phosphorothioate linkage
  modified_base 29: mod_base = OTHER; note = 2'-O-methyl modified nucleotide
  modified_base 30: mod_base = OTHER; note = 2'-O-methyl modified nucleotide
  modified_base 31: mod_base = OTHER; note = 2'-O-methyl modified nucleotide
  modified_base 32: mod_base = OTHER; note = 2'-O-methyl modified nucleotide
  modified_base 33: mod_base = OTHER; note = 2'-O-methyl modified nucleotide
  modified_base 34: mod_base = OTHER; note = 2'-O-methyl modified nucleotide
  modified_base 35: mod_base = OTHER; note = 2'-O-methyl modified nucleotide
  modified_base 36: mod_base = OTHER; note = 2'-O-methyl modified nucleotide
  modified_base 37: mod_base = OTHER; note = 2'-O-methyl modified nucleotide
  modified_base 38: mod_base = OTHER; note = 2'-O-methyl modified nucleotide
  modified_base 39: mod_base = OTHER; note = 2'-O-methyl modified nucleotide
  modified_base 40: mod_base = OTHER; note = 2'-O-methyl modified nucleotide
  modified_base 69: mod_base = OTHER; note = 2'-O-methyl modified nucleotide
  modified_base 70: mod_base = OTHER; note = 2'-O-methyl modified nucleotide
  modified_base 71: mod_base = OTHER; note = 2'-O-methyl modified nucleotide
  modified_base 72: mod_base = OTHER; note = 2'-O-methyl modified nucleotide
  modified_base 73: mod_base = OTHER; note = 2'-O-methyl modified nucleotide
  modified_base 74: mod_base = OTHER; note = 2'-O-methyl modified nucleotide
  modified_base 75: mod_base = OTHER; note = 2'-O-methyl modified nucleotide
  modified_base 76: mod_base = OTHER; note = 2'-O-methyl modified nucleotide
  modified_base 77: mod_base = OTHER; note = 2'-O-methyl modified nucleotide
  modified_base 78: mod_base = OTHER; note = 2'-O-methyl modified nucleotide
  modified_base 79: mod_base = OTHER; note = 2'-O-methyl modified nucleotide
  modified_base 80: mod_base = OTHER; note = 2'-O-methyl modified nucleotide
  modified_base 81: mod_base = OTHER; note = 2'-O-methyl modified nucleotide
  modified_base 82: mod_base = OTHER; note = 2'-O-methyl modified nucleotide
  modified_base 83: mod_base = OTHER; note = 2'-O-methyl modified nucleotide
  modified_base 84: mod_base = OTHER; note = 2'-O-methyl modified nucleotide
  modified_base 85: mod_base = OTHER; note = 2'-O-methyl modified nucleotide
  modified_base 86: mod_base = OTHER; note = 2'-O-methyl modified nucleotide
  modified_base 87: mod_base = OTHER; note = 2'-O-methyl modified nucleotide
  modified_base 88: mod_base = OTHER; note = 2'-O-methyl modified nucleotide
  modified_base 89: mod_base = OTHER; note = 2'-O-methyl modified nucleotide
  modified_base 90: mod_base = OTHER; note = 2'-O-methyl modified nucleotide
  modified_base 91: mod_base = OTHER; note = 2'-O-methyl modified nucleotide
  modified_base 92: mod_base = OTHER; note = 2'-O-methyl modified nucleotide
  modified_base 93: mod_base = OTHER; note = 2'-O-methyl modified nucleotide
  modified_base 94: mod_base = OTHER; note = 2'-O-methyl modified nucleotide
  modified_base 95: mod_base = OTHER; note = 2'-O-methyl modified nucleotide
  modified_base 96: mod_base = OTHER; note = 2'-O-methyl modified nucleotide
  modified_base 112: mod_base = OTHER; note = Nucleotide with phosphorothioate linkage
  modified_base 113: mod_base = OTHER; note = 2'-O-methyl modified nucleotide with phosphorothioate linkage
  modified_base 114: mod_base = OTHER; note = 2'-O-methyl modified nucleotide with phosphorothioate linkage
  modified_base 115: mod_base = OTHER; note = 2'-O-methyl modified nucleotide
gagaatcaaaatcggtgaatgttttagagctagaaatagcaagttaaaataaggctagtccgttatcaacttgaaaaagtggcaccgagtcggtgcgtctgattcaccgattttg

SEQ ID NO: 16298 - RNA, 114 nt, synthetic construct
  source 1..114: mol_type = other RNA
  modified_base 1: mod_base = OTHER; note = 2'-O-methyl modified nucleotide with phosphorothioate linkage
  modified_base 2: mod_base = OTHER; note = 2'-O-methyl modified nucleotide with phosphorothioate linkage
  modified_base 3: mod_base = OTHER; note = 2'-O-methyl modified nucleotide with phosphorothioate linkage
  modified_base 29: mod_base = OTHER; note = 2'-O-methyl modified nucleotide
  modified_base 30: mod_base = OTHER; note = 2'-O-methyl modified nucleotide
  modified_base 31: mod_base = OTHER; note = 2'-O-methyl modified nucleotide
  modified_base 32: mod_base = OTHER; note = 2'-O-methyl modified nucleotide
  modified_base 33: mod_base = OTHER; note = 2'-O-methyl modified nucleotide
  modified_base 34: mod_base = OTHER; note = 2'-O-methyl modified nucleotide
  modified_base 35: mod_base = OTHER; note = 2'-O-methyl modified nucleotide
  modified_base 36: mod_base = OTHER; note = 2'-O-methyl modified nucleotide
  modified_base 37: mod_base = OTHER; note = 2'-O-methyl modified nucleotide
  modified_base 38: mod_base = OTHER; note = 2'-O-methyl modified nucleotide
  modified_base 39: mod_base = OTHER; note = 2'-O-methyl modified nucleotide
  modified_base 40: mod_base = OTHER; note = 2'-O-methyl modified nucleotide
  modified_base 69: mod_base = OTHER; note = 2'-O-methyl modified nucleotide
  modified_base 70: mod_base = OTHER; note = 2'-O-methyl modified nucleotide
  modified_base 71: mod_base = OTHER; note = 2'-O-methyl modified nucleotide
  modified_base 72: mod_base = OTHER; note = 2'-O-methyl modified nucleotide
  modified_base 73: mod_base = OTHER; note = 2'-O-methyl modified nucleotide
  modified_base 74: mod_base = OTHER; note = 2'-O-methyl modified nucleotide
  modified_base 75: mod_base = OTHER; note = 2'-O-methyl modified nucleotide
  modified_base 76: mod_base = OTHER; note = 2'-O-methyl modified nucleotide
  modified_base 77: mod_base = OTHER; note = 2'-O-methyl modified nucleotide
  modified_base 78: mod_base = OTHER; note = 2'-O-methyl modified nucleotide
  modified_base 79: mod_base = OTHER; note = 2'-O-methyl modified nucleotide
  modified_base 80: mod_base = OTHER; note = 2'-O-methyl modified nucleotide
  modified_base 81: mod_base = OTHER; note = 2'-O-methyl modified nucleotide
  modified_base 82: mod_base = OTHER; note = 2'-O-methyl modified nucleotide
  modified_base 83: mod_base = OTHER; note = 2'-O-methyl modified nucleotide
  modified_base 84: mod_base = OTHER; note = 2'-O-methyl modified nucleotide
  modified_base 85: mod_base = OTHER; note = 2'-O-methyl modified nucleotide
  modified_base 86: mod_base = OTHER; note = 2'-O-methyl modified nucleotide
  modified_base 87: mod_base = OTHER; note = 2'-O-methyl modified nucleotide
  modified_base 88: mod_base = OTHER; note = 2'-O-methyl modified nucleotide
  modified_base 89: mod_base = OTHER; note = 2'-O-methyl modified nucleotide
  modified_base 90: mod_base = OTHER; note = 2'-O-methyl modified nucleotide
  modified_base 91: mod_base = OTHER; note = 2'-O-methyl modified nucleotide
  modified_base 92: mod_base = OTHER; note = 2'-O-methyl modified nucleotide
  modified_base 93: mod_base = OTHER; note = 2'-O-methyl modified nucleotide
  modified_base 94: mod_base = OTHER; note = 2'-O-methyl modified nucleotide
  modified_base 95: mod_base = OTHER; note = 2'-O-methyl modified nucleotide
  modified_base 96: mod_base = OTHER; note = 2'-O-methyl modified nucleotide
  modified_base 111: mod_base = OTHER; note = Nucleotide with phosphorothioate linkage
  modified_base 112: mod_base = OTHER; note = 2'-O-methyl modified nucleotide with phosphorothioate linkage
  modified_base 113: mod_base = OTHER; note = 2'-O-methyl modified nucleotide with phosphorothioate linkage
  modified_base 114: mod_base = OTHER; note = 2'-O-methyl modified nucleotide
gagaatcaaaatcggtgaatgttttagagctagaaatagcaagttaaaataaggctagtccgttatcaacttgaaaaagtggcaccgagtcggtgcgtctgattcaccgatttt

SEQ ID NO: 16299 - RNA, 113 nt, synthetic construct
  source 1..113: mol_type = other RNA
  modified_base 1: mod_base = OTHER; note = 2'-O-methyl modified nucleotide with phosphorothioate linkage
  modified_base 2: mod_base = OTHER; note = 2'-O-methyl modified nucleotide with phosphorothioate linkage
  modified_base 3: mod_base = OTHER; note = 2'-O-methyl modified nucleotide with phosphorothioate linkage
  modified_base 29: mod_base = OTHER; note = 2'-O-methyl modified nucleotide
  modified_base 30: mod_base = OTHER; note = 2'-O-methyl modified nucleotide
  modified_base 31: mod_base = OTHER; note = 2'-O-methyl modified nucleotide
  modified_base 32: mod_base = OTHER; note = 2'-O-methyl modified nucleotide
  modified_base 33: mod_base = OTHER; note = 2'-O-methyl modified nucleotide
  modified_base 34: mod_base = OTHER; note = 2'-O-methyl modified nucleotide
  modified_base 35: mod_base = OTHER; note = 2'-O-methyl modified nucleotide
  modified_base 36: mod_base = OTHER; note = 2'-O-methyl modified nucleotide
  modified_base 37: mod_base = OTHER; note = 2'-O-methyl modified nucleotide
  modified_base 38: mod_base = OTHER; note = 2'-O-methyl modified nucleotide
  modified_base 39: mod_base = OTHER; note = 2'-O-methyl modified nucleotide
  modified_base 40: mod_base = OTHER; note = 2'-O-methyl modified nucleotide
  modified_base 69: mod_base = OTHER; note = 2'-O-methyl modified nucleotide
  modified_base 70: mod_base = OTHER; note = 2'-O-methyl modified nucleotide
  modified_base 71: mod_base = OTHER; note = 2'-O-methyl modified nucleotide
  modified_base 72: mod_base = OTHER; note = 2'-O-methyl modified nucleotide
  modified_base 73: mod_base = OTHER; note = 2'-O-methyl modified nucleotide
  modified_base 74: mod_base = OTHER; note = 2'-O-methyl modified nucleotide
  modified_base 75: mod_base = OTHER; note = 2'-O-methyl modified nucleotide
  modified_base 76: mod_base = OTHER; note = 2'-O-methyl modified nucleotide
  modified_base 77: mod_base = OTHER; note = 2'-O-methyl modified nucleotide
  modified_base 78: mod_base = OTHER; note = 2'-O-methyl modified nucleotide
  modified_base 79: mod_base = OTHER; note = 2'-O-methyl modified nucleotide
  modified_base 80: mod_base = OTHER; note = 2'-O-methyl modified nucleotide
  modified_base 81: mod_base = OTHER; note = 2'-O-methyl modified nucleotide
  modified_base 82: mod_base = OTHER; note = 2'-O-methyl modified nucleotide
  modified_base 83: mod_base = OTHER; note = 2'-O-methyl modified nucleotide
  modified_base 84: mod_base = OTHER; note = 2'-O-methyl modified nucleotide
  modified_base 85: mod_base = OTHER; note = 2'-O-methyl modified nucleotide
  modified_base 86: mod_base = OTHER; note = 2'-O-methyl modified nucleotide
  modified_base 87: mod_base = OTHER; note = 2'-O-methyl modified nucleotide
  modified_base 88: mod_base = OTHER; note = 2'-O-methyl modified nucleotide
  modified_base 89: mod_base = OTHER; note = 2'-O-methyl modified nucleotide
  modified_base 90: mod_base = OTHER; note = 2'-O-methyl modified nucleotide
  modified_base 91: mod_base = OTHER; note = 2'-O-methyl modified nucleotide
  modified_base 92: mod_base = OTHER; note = 2'-O-methyl modified nucleotide
  modified_base 93: mod_base = OTHER; note = 2'-O-methyl modified nucleotide
  modified_base 94: mod_base = OTHER; note = 2'-O-methyl modified nucleotide
  modified_base 95: mod_base = OTHER; note = 2'-O-methyl modified nucleotide
  modified_base 96: mod_base = OTHER; note = 2'-O-methyl modified nucleotide
  modified_base 110: mod_base = OTHER; note = Nucleotide with phosphorothioate linkage
  modified_base 111: mod_base = OTHER; note = 2'-O-methyl modified nucleotide with phosphorothioate linkage
  modified_base 112: mod_base = OTHER; note = 2'-O-methyl modified nucleotide with phosphorothioate linkage
  modified_base 113: mod_base = OTHER; note = 2'-O-methyl modified nucleotide
gagaatcaaaatcggtgaatgttttagagctagaaatagcaagttaaaataaggctagtccgttatcaacttgaaaaagtggcaccgagtcggtgcgtctgattcaccgattt

SEQ ID NO: 16300 - RNA, 112 nt, synthetic construct
  source 1..112: mol_type = other RNA
  modified_base 1: mod_base = OTHER; note = 2'-O-methyl modified nucleotide with phosphorothioate linkage
  modified_base 2: mod_base = OTHER; note = 2'-O-methyl modified nucleotide with phosphorothioate linkage
  modified_base 3: mod_base = OTHER; note = 2'-O-methyl modified nucleotide with phosphorothioate linkage
  modified_base 29: mod_base = OTHER; note = 2'-O-methyl modified nucleotide
  modified_base 30: mod_base = OTHER; note = 2'-O-methyl modified nucleotide
  modified_base 31: mod_base = OTHER; note = 2'-O-methyl modified nucleotide
  modified_base 32: mod_base = OTHER; note = 2'-O-methyl modified nucleotide
  modified_base 33: mod_base = OTHER; note = 2'-O-methyl modified nucleotide
  modified_base 34: mod_base = OTHER; note = 2'-O-methyl modified nucleotide
  modified_base 35: mod_base = OTHER; note = 2'-O-methyl modified nucleotide
  modified_base 36: mod_base = OTHER; note = 2'-O-methyl modified nucleotide
  modified_base 37: mod_base = OTHER; note = 2'-O-methyl modified nucleotide
  modified_base 38: mod_base = OTHER; note = 2'-O-methyl modified nucleotide
  modified_base 39: mod_base = OTHER; note = 2'-O-methyl modified nucleotide
  modified_base 40: mod_base = OTHER; note = 2'-O-methyl modified nucleotide
  modified_base 69: mod_base = OTHER; note = 2'-O-methyl modified nucleotide
  modified_base 70: mod_base = OTHER; note = 2'-O-methyl modified nucleotide
  modified_base 71: mod_base = OTHER; note = 2'-O-methyl modified nucleotide
  modified_base 72: mod_base = OTHER; note = 2'-O-methyl modified nucleotide
  modified_base 73: mod_base = OTHER; note = 2'-O-methyl modified nucleotide
  modified_base 74: mod_base = OTHER; note = 2'-O-methyl modified nucleotide
  modified_base 75: mod_base = OTHER; note = 2'-O-methyl modified nucleotide
  modified_base 76: mod_base = OTHER; note = 2'-O-methyl modified nucleotide
  modified_base 77: mod_base = OTHER; note = 2'-O-methyl modified nucleotide
  modified_base 78: mod_base = OTHER; note = 2'-O-methyl modified nucleotide
  modified_base 79: mod_base = OTHER; note = 2'-O-methyl modified nucleotide
  modified_base 80: mod_base = OTHER; note = 2'-O-methyl modified nucleotide
  modified_base 81: mod_base = OTHER; note = 2'-O-methyl modified nucleotide
  modified_base 82: mod_base = OTHER; note = 2'-O-methyl modified nucleotide
  modified_base 83: mod_base = OTHER; note = 2'-O-methyl modified nucleotide
  modified_base 84: mod_base = OTHER; note = 2'-O-methyl modified nucleotide
  modified_base 85: mod_base = OTHER; note = 2'-O-methyl modified nucleotide
  modified_base 86: mod_base = OTHER; note = 2'-O-methyl modified nucleotide
  modified_base 87: mod_base = OTHER; note = 2'-O-methyl modified nucleotide
  modified_base 88: mod_base = OTHER; note = 2'-O-methyl modified nucleotide
  modified_base 89: mod_base = OTHER; note = 2'-O-methyl modified nucleotide
  modified_base 90: mod_base = OTHER; note = 2'-O-methyl modified nucleotide
  modified_base 91: mod_base = OTHER; note = 2'-O-methyl modified nucleotide
  modified_base 92: mod_base = OTHER; note = 2'-O-methyl modified nucleotide
  modified_base 93: mod_base = OTHER; note = 2'-O-methyl modified nucleotide
  modified_base 94: mod_base = OTHER; note = 2'-O-methyl modified nucleotide
  modified_base 95: mod_base = OTHER; note = 2'-O-methyl modified nucleotide
  modified_base 96: mod_base = OTHER; note = 2'-O-methyl modified nucleotide
  modified_base 109: mod_base = OTHER; note = Nucleotide with phosphorothioate linkage
  modified_base 110: mod_base = OTHER; note = 2'-O-methyl modified nucleotide with phosphorothioate linkage
  modified_base 111: mod_base = OTHER; note = 2'-O-methyl modified nucleotide with phosphorothioate linkage
  modified_base 112: mod_base = OTHER; note = 2'-O-methyl modified nucleotide
gagaatcaaaatcggtgaatgttttagagctagaaatagcaagttaaaataaggctagtccgttatcaacttgaaaaagtggcaccgagtcggtgcgtctgattcaccgatt

SEQ ID NO: 16301 - RNA, 119 nt, synthetic construct
  source 1..119: mol_type = other RNA
  modified_base 1: mod_base = OTHER; note = 2'-O-methyl modified nucleotide with phosphorothioate linkage
  modified_base 2: mod_base = OTHER; note = 2'-O-methyl modified nucleotide with phosphorothioate linkage
  modified_base 3: mod_base = OTHER; note = 2'-O-methyl modified nucleotide with phosphorothioate linkage
  modified_base 29: mod_base = OTHER; note = 2'-O-methyl modified nucleotide
  modified_base 30: mod_base = OTHER; note = 2'-O-methyl modified nucleotide
  modified_base 31: mod_base = OTHER; note = 2'-O-methyl modified nucleotide
  modified_base 32: mod_base = OTHER; note = 2'-O-methyl modified nucleotide
  modified_base 33: mod_base = OTHER; note = 2'-O-methyl modified nucleotide
  modified_base 34: mod_base = OTHER; note = 2'-O-methyl modified nucleotide
  modified_base 35: mod_base = OTHER; note = 2'-O-methyl modified nucleotide
  modified_base 36: mod_base = OTHER; note = 2'-O-methyl modified nucleotide
  modified_base 37: mod_base = OTHER; note = 2'-O-methyl modified nucleotide
  modified_base 38: mod_base = OTHER; note = 2'-O-methyl modified nucleotide
  modified_base 39: mod_base = OTHER; note = 2'-O-methyl modified nucleotide
  modified_base 40: mod_base = OTHER; note = 2'-O-methyl modified nucleotide
  modified_base 69: mod_base = OTHER; note = 2'-O-methyl modified nucleotide
  modified_base 70: mod_base = OTHER; note = 2'-O-methyl modified nucleotide
  modified_base 71: mod_base = OTHER; note = 2'-O-methyl modified nucleotide
  modified_base 72: mod_base = OTHER; note = 2'-O-methyl modified nucleotide
  modified_base 73: mod_base = OTHER; note = 2'-O-methyl modified nucleotide
  modified_base 74: mod_base = OTHER; note = 2'-O-methyl modified nucleotide
  modified_base 75: mod_base = OTHER; note = 2'-O-methyl modified nucleotide
  modified_base 76: mod_base = OTHER; note = 2'-O-methyl modified nucleotide
  modified_base 77: mod_base = OTHER; note = 2'-O-methyl modified nucleotide
  modified_base 78: mod_base = OTHER; note = 2'-O-methyl modified nucleotide
  modified_base 79: mod_base = OTHER; note = 2'-O-methyl modified nucleotide
  modified_base 80: mod_base = OTHER; note = 2'-O-methyl modified nucleotide
  modified_base 81: mod_base = OTHER; note = 2'-O-methyl modified nucleotide
  modified_base 82: mod_base = OTHER; note = 2'-O-methyl modified nucleotide
  modified_base 83: mod_base = OTHER; note = 2'-O-methyl modified nucleotide
  modified_base 84: mod_base = OTHER; note = 2'-O-methyl modified nucleotide
  modified_base 85: mod_base = OTHER; note = 2'-O-methyl modified nucleotide
  modified_base 86: mod_base = OTHER; note = 2'-O-methyl modified nucleotide
  modified_base 87: mod_base = OTHER; note = 2'-O-methyl modified nucleotide
  modified_base 88: mod_base = OTHER; note = 2'-O-methyl modified nucleotide
  modified_base 89: mod_base = OTHER; note = 2'-O-methyl modified nucleotide
  modified_base 90: mod_base = OTHER; note = 2'-O-methyl modified nucleotide
  modified_base 91: mod_base = OTHER; note = 2'-O-methyl modified nucleotide
  modified_base 92: mod_base = OTHER; note = 2'-O-methyl modified nucleotide
  modified_base 93: mod_base = OTHER; note = 2'-O-methyl modified nucleotide
  modified_base 94: mod_base = OTHER; note = 2'-O-methyl modified nucleotide
  modified_base 95: mod_base = OTHER; note = 2'-O-methyl modified nucleotide
  modified_base 96: mod_base = OTHER; note = 2'-O-methyl modified nucleotide
  modified_base 116: mod_base = OTHER; note = Nucleotide with phosphorothioate linkage
  modified_base 117: mod_base = OTHER; note = 2'-O-methyl modified nucleotide with phosphorothioate linkage
  modified_base 118: mod_base = OTHER; note = 2'-O-methyl modified nucleotide with phosphorothioate linkage
  modified_base 119: mod_base = OTHER; note = 2'-O-methyl modified nucleotide
gagaatcaaaatcggtgaatgttttagagctagaaatagcaagttaaaataaggctagtccgttatcaacttgaaaaagtggcaccgagtcggtgcaagtctgattcaccgattttgat

SEQ ID NO: 16302 - RNA, 118 nt, synthetic construct
  source 1..118: mol_type = other RNA
  modified_base 1: mod_base = OTHER; note = 2'-O-methyl modified nucleotide with phosphorothioate linkage
  modified_base 2: mod_base = OTHER; note = 2'-O-methyl modified nucleotide with phosphorothioate linkage
  modified_base 3: mod_base = OTHER; note = 2'-O-methyl modified nucleotide with phosphorothioate linkage
  modified_base 29: mod_base = OTHER; note = 2'-O-methyl modified nucleotide
  modified_base 30: mod_base = OTHER; note = 2'-O-methyl modified nucleotide
  modified_base 31: mod_base = OTHER; note = 2'-O-methyl modified nucleotide
  modified_base 32: mod_base = OTHER; note = 2'-O-methyl modified nucleotide
  modified_base 33: mod_base = OTHER; note = 2'-O-methyl modified nucleotide
  modified_base 34: mod_base = OTHER; note = 2'-O-methyl modified nucleotide
  modified_base 35: mod_base = OTHER; note = 2'-O-methyl modified nucleotide
  modified_base 36: mod_base = OTHER; note = 2'-O-methyl modified nucleotide
  modified_base 37: mod_base = OTHER; note = 2'-O-methyl modified nucleotide
  modified_base 38: mod_base = OTHER; note = 2'-O-methyl modified nucleotide
  modified_base 39: mod_base = OTHER; note = 2'-O-methyl modified nucleotide
  modified_base 40: mod_base = OTHER; note = 2'-O-methyl modified nucleotide
  modified_base 69: mod_base = OTHER; note = 2'-O-methyl modified nucleotide
  modified_base 70: mod_base = OTHER; note = 2'-O-methyl modified nucleotide
  modified_base 71: mod_base = OTHER; note = 2'-O-methyl modified nucleotide
  modified_base 72: mod_base = OTHER; note = 2'-O-methyl modified nucleotide
  modified_base 73: mod_base = OTHER; note = 2'-O-methyl modified nucleotide
  modified_base 74: mod_base = OTHER; note = 2'-O-methyl modified nucleotide
  modified_base 75: mod_base = OTHER; note = 2'-O-methyl modified nucleotide
  modified_base 76: mod_base = OTHER; note = 2'-O-methyl modified nucleotide
  modified_base 77: mod_base = OTHER; note = 2'-O-methyl modified nucleotide
  modified_base 78: mod_base = OTHER; note = 2'-O-methyl modified nucleotide
  modified_base 79: mod_base = OTHER; note = 2'-O-methyl modified nucleotide
  modified_base 80: mod_base = OTHER; note = 2'-O-methyl modified nucleotide
  modified_base 81: mod_base = OTHER; note = 2'-O-methyl modified nucleotide
  modified_base 82: mod_base = OTHER; note = 2'-O-methyl modified nucleotide
  modified_base 83: mod_base = OTHER; note = 2'-O-methyl modified nucleotide
  modified_base 84: mod_base = OTHER; note = 2'-O-methyl modified nucleotide
  modified_base 85: mod_base = OTHER; note = 2'-O-methyl modified nucleotide
  modified_base 86: mod_base = OTHER; note = 2'-O-methyl modified nucleotide
  modified_base 87: mod_base = OTHER; note = 2'-O-methyl modified nucleotide
  modified_base 88: mod_base = OTHER; note = 2'-O-methyl modified nucleotide
  modified_base 89: mod_base = OTHER; note = 2'-O-methyl modified nucleotide
  modified_base 90: mod_base = OTHER; note = 2'-O-methyl modified nucleotide
  modified_base 91: mod_base = OTHER; note = 2'-O-methyl modified nucleotide
  modified_base 92: mod_base = OTHER; note = 2'-O-methyl modified nucleotide
  modified_base 93: mod_base = OTHER; note = 2'-O-methyl modified nucleotide
  modified_base 94: mod_base = OTHER; note = 2'-O-methyl modified nucleotide
  modified_base 95: mod_base = OTHER; note = 2'-O-methyl modified nucleotide
  modified_base 96: mod_base = OTHER; note = 2'-O-methyl modified nucleotide
  modified_base 115: mod_base = OTHER; note = Nucleotide with phosphorothioate linkage
  modified_base 116: mod_base = OTHER; note = 2'-O-methyl modified nucleotide with phosphorothioate linkage
  modified_base 117: mod_base = OTHER; note = 2'-O-methyl modified nucleotide with phosphorothioate linkage
  modified_base 118: mod_base = OTHER; note = 2'-O-methyl modified nucleotide
gagaatcaaaatcggtgaatgttttagagctagaaatagcaagttaaaataaggctagtccgttatcaacttgaaaaagtggcaccgagtcggtgcaagtctgattcaccgattttga

SEQ ID NO: 16303 - RNA, 117 nt, synthetic construct
  source 1..117: mol_type = other RNA
  modified_base 1: mod_base = OTHER; note = 2'-O-methyl modified nucleotide with phosphorothioate linkage
  modified_base 2: mod_base = OTHER; note = 2'-O-methyl modified nucleotide with phosphorothioate linkage
  modified_base 3: mod_base = OTHER; note = 2'-O-methyl modified nucleotide with phosphorothioate linkage
  modified_base 29: mod_base = OTHER; note = 2'-O-methyl modified nucleotide
  modified_base 30: mod_base = OTHER; note = 2'-O-methyl modified nucleotide
  modified_base 31: mod_base = OTHER; note = 2'-O-methyl modified nucleotide
  modified_base 32: mod_base = OTHER; note = 2'-O-methyl modified nucleotide
  modified_base 33: mod_base = OTHER; note = 2'-O-methyl modified nucleotide
  modified_base 34: mod_base = OTHER; note = 2'-O-methyl modified nucleotide
  modified_base 35: mod_base = OTHER; note = 2'-O-methyl modified nucleotide
  modified_base 36: mod_base = OTHER; note = 2'-O-methyl modified nucleotide
  modified_base 37: mod_base = OTHER; note = 2'-O-methyl modified nucleotide
  modified_base 38: mod_base = OTHER; note = 2'-O-methyl modified nucleotide
  modified_base 39: mod_base = OTHER; note = 2'-O-methyl modified nucleotide
  modified_base 40: mod_base = OTHER; note = 2'-O-methyl modified nucleotide
  modified_base 69: mod_base = OTHER; note = 2'-O-methyl modified nucleotide
  modified_base 70: mod_base = OTHER; note = 2'-O-methyl modified nucleotide
  modified_base 71: mod_base = OTHER; note = 2'-O-methyl modified nucleotide
  modified_base 72: mod_base = OTHER; note = 2'-O-methyl modified nucleotide
  modified_base 73: mod_base = OTHER; note = 2'-O-methyl modified nucleotide
  modified_base 74: mod_base = OTHER; note = 2'-O-methyl modified nucleotide
  modified_base 75: mod_base = OTHER; note = 2'-O-methyl modified nucleotide
  modified_base 76: mod_base = OTHER; note = 2'-O-methyl modified nucleotide
  modified_base 77: mod_base = OTHER; note = 2'-O-methyl modified nucleotide
  modified_base 78: mod_base = OTHER; note = 2'-O-methyl modified nucleotide
  modified_base 79: mod_base = OTHER; note = 2'-O-methyl modified nucleotide
  modified_base 80: mod_base = OTHER; note = 2'-O-methyl modified nucleotide
  modified_base 81: mod_base = OTHER; note = 2'-O-methyl modified nucleotide
  modified_base 82: mod_base = OTHER; note = 2'-O-methyl modified nucleotide
  modified_base 83: mod_base = OTHER; note = 2'-O-methyl modified nucleotide
  modified_base 84: mod_base = OTHER; note = 2'-O-methyl modified nucleotide
  modified_base 85: mod_base = OTHER; note = 2'-O-methyl modified nucleotide
  modified_base 86: mod_base = OTHER; note = 2'-O-methyl modified nucleotide
  modified_base 87: mod_base = OTHER; note = 2'-O-methyl modified nucleotide
  modified_base 88: mod_base = OTHER; note = 2'-O-methyl modified nucleotide
  modified_base 89: mod_base = OTHER; note = 2'-O-methyl modified nucleotide
  modified_base 90: mod_base = OTHER; note = 2'-O-methyl modified nucleotide
  modified_base 91: mod_base = OTHER; note = 2'-O-methyl modified nucleotide
  modified_base 92: mod_base = OTHER; note = 2'-O-methyl modified nucleotide
  modified_base 93: mod_base = OTHER; note = 2'-O-methyl modified nucleotide
  modified_base 94: mod_base = OTHER; note = 2'-O-methyl modified nucleotide
  modified_base 95: mod_base = OTHER; note = 2'-O-methyl modified nucleotide
  modified_base 96: mod_base = OTHER; note = 2'-O-methyl modified nucleotide
  modified_base 114: mod_base = OTHER; note = Nucleotide with phosphorothioate linkage
  modified_base 115: mod_base = OTHER; note = 2'-O-methyl modified nucleotide with phosphorothioate linkage
  modified_base 116: mod_base = OTHER; note = 2'-O-methyl modified nucleotide with phosphorothioate linkage
  modified_base 117: mod_base = OTHER; note = 2'-O-methyl modified nucleotide
gagaatcaaaatcggtgaatgttttagagctagaaatagcaagttaaaataaggctagtccgttatcaacttgaaaaagtggcaccgagtcggtgcaagtctgattcaccgattttg

SEQ ID NO: 16304 - RNA, 116 nt, synthetic construct
  source 1..116: mol_type = other RNA
  modified_base 1: mod_base = OTHER; note = 2'-O-methyl modified nucleotide with phosphorothioate linkage
  modified_base 2: mod_base = OTHER; note = 2'-O-methyl modified nucleotide with phosphorothioate linkage
  modified_base 3: mod_base = OTHER; note = 2'-O-methyl modified nucleotide with phosphorothioate linkage
  modified_base 29: mod_base = OTHER; note = 2'-O-methyl modified nucleotide
  modified_base 30: mod_base = OTHER; note = 2'-O-methyl modified nucleotide
  modified_base 31: mod_base = OTHER; note = 2'-O-methyl modified nucleotide
  modified_base 32: mod_base = OTHER; note = 2'-O-methyl modified nucleotide
  modified_base 33: mod_base = OTHER; note = 2'-O-methyl modified nucleotide
  modified_base 34: mod_base = OTHER; note = 2'-O-methyl modified nucleotide
  modified_base 35: mod_base = OTHER; note = 2'-O-methyl modified nucleotide
  modified_base 36: mod_base = OTHER; note = 2'-O-methyl modified nucleotide
  modified_base 37: mod_base = OTHER; note = 2'-O-methyl modified nucleotide
  modified_base 38: mod_base = OTHER; note = 2'-O-methyl modified nucleotide
  modified_base 39: mod_base = OTHER; note = 2'-O-methyl modified nucleotide
  modified_base 40: mod_base = OTHER; note = 2'-O-methyl modified nucleotide
  modified_base 69: mod_base = OTHER; note = 2'-O-methyl modified nucleotide
  modified_base 70: mod_base = OTHER; note = 2'-O-methyl modified nucleotide
  modified_base 71: mod_base = OTHER; note = 2'-O-methyl modified nucleotide
  modified_base 72: mod_base = OTHER; note = 2'-O-methyl modified nucleotide
  modified_base 73: mod_base = OTHER; note = 2'-O-methyl modified nucleotide
  modified_base 74: mod_base = OTHER; note = 2'-O-methyl modified nucleotide
  modified_base 75: mod_base = OTHER; note = 2'-O-methyl modified nucleotide
  modified_base 76: mod_base = OTHER; note = 2'-O-methyl modified nucleotide
  modified_base 77: mod_base = OTHER; note = 2'-O-methyl modified nucleotide
  modified_base 78: mod_base = OTHER; note = 2'-O-methyl modified nucleotide
  modified_base 79: mod_base = OTHER; note = 2'-O-methyl modified nucleotide
  modified_base 80: mod_base = OTHER; note = 2'-O-methyl modified nucleotide
  modified_base 81: mod_base = OTHER; note = 2'-O-methyl modified nucleotide
  modified_base 82: mod_base = OTHER; note = 2'-O-methyl modified nucleotide
  modified_base 83: mod_base = OTHER; note = 2'-O-methyl modified nucleotide
  modified_base 84: mod_base = OTHER; note = 2'-O-methyl modified nucleotide
  modified_base 85: mod_base = OTHER; note = 2'-O-methyl modified nucleotide
  modified_base 86: mod_base = OTHER; note = 2'-O-methyl modified nucleotide
  modified_base 87: mod_base = OTHER; note = 2'-O-methyl modified nucleotide
  modified_base 88: mod_base = OTHER; note = 2'-O-methyl modified nucleotide
  modified_base 89: mod_base = OTHER; note = 2'-O-methyl modified nucleotide
  modified_base 90: mod_base = OTHER; note = 2'-O-methyl modified nucleotide
  modified_base 91: mod_base = OTHER; note = 2'-O-methyl modified nucleotide
  modified_base 92: mod_base = OTHER; note = 2'-O-methyl modified nucleotide
  modified_base 93: mod_base = OTHER; note = 2'-O-methyl modified nucleotide
  modified_base 94: mod_base = OTHER; note = 2'-O-methyl modified nucleotide
  modified_base 95: mod_base = OTHER; note = 2'-O-methyl modified nucleotide
  modified_base 96: mod_base = OTHER; note = 2'-O-methyl modified nucleotide
  modified_base 113: mod_base = OTHER; note = Nucleotide with phosphorothioate linkage
  modified_base 114: mod_base = OTHER; note = 2'-O-methyl modified nucleotide with phosphorothioate linkage
  modified_base 115: mod_base = OTHER; note = 2'-O-methyl modified nucleotide with phosphorothioate linkage
  modified_base 116: mod_base = OTHER; note = 2'-O-methyl modified nucleotide
gagaatcaaaatcggtgaatgttttagagctagaaatagcaagttaaaataaggctagtccgttatcaacttgaaaaagtggcaccgagtcggtgcaagtctgattcaccgatttt

SEQ ID NO: 16305 - RNA, 115 nt, synthetic construct
  source 1..115: mol_type = other RNA
  modified_base 1: mod_base = OTHER; note = 2'-O-methyl modified nucleotide with phosphorothioate linkage
  modified_base 2: mod_base = OTHER; note = 2'-O-methyl modified nucleotide with phosphorothioate linkage
  modified_base 3: mod_base = OTHER; note = 2'-O-methyl modified nucleotide with phosphorothioate linkage
  modified_base 29: mod_base = OTHER; note = 2'-O-methyl modified nucleotide
  modified_base 30: mod_base = OTHER; note = 2'-O-methyl modified nucleotide
  modified_base 31: mod_base = OTHER; note = 2'-O-methyl modified nucleotide
  modified_base 32: mod_base = OTHER; note = 2'-O-methyl modified nucleotide
  modified_base 33: mod_base = OTHER; note = 2'-O-methyl modified nucleotide
  modified_base 34: mod_base = OTHER; note = 2'-O-methyl modified nucleotide
  modified_base 35: mod_base = OTHER; note = 2'-O-methyl modified nucleotide
  modified_base 36: mod_base = OTHER; note = 2'-O-methyl modified nucleotide
  modified_base 37: mod_base = OTHER; note = 2'-O-methyl modified nucleotide
  modified_base 38: mod_base = OTHER; note = 2'-O-methyl modified nucleotide
  modified_base 39: mod_base = OTHER; note = 2'-O-methyl modified nucleotide
  modified_base 40: mod_base = OTHER; note = 2'-O-methyl modified nucleotide
  modified_base 69: mod_base = OTHER; note = 2'-O-methyl modified nucleotide
  modified_base 70: mod_base = OTHER; note = 2'-O-methyl modified nucleotide
  modified_base 71: mod_base = OTHER; note = 2'-O-methyl modified nucleotide
  modified_base 72: mod_base = OTHER; note = 2'-O-methyl modified nucleotide
  modified_base 73: mod_base = OTHER; note = 2'-O-methyl modified nucleotide
  modified_base 74: mod_base = OTHER; note = 2'-O-methyl modified nucleotide
  modified_base 75: mod_base = OTHER; note = 2'-O-methyl modified nucleotide
  modified_base 76: mod_base = OTHER; note = 2'-O-methyl modified nucleotide
  modified_base 77: mod_base = OTHER; note = 2'-O-methyl modified nucleotide
  modified_base 78: mod_base = OTHER; note = 2'-O-methyl modified nucleotide
  modified_base 79: mod_base = OTHER; note = 2'-O-methyl modified nucleotide
  modified_base 80: mod_base = OTHER; note = 2'-O-methyl modified nucleotide
  modified_base 81: mod_base = OTHER; note = 2'-O-methyl modified nucleotide
  modified_base 82: mod_base = OTHER; note = 2'-O-methyl modified nucleotide
  modified_base 83: mod_base = OTHER; note = 2'-O-methyl modified nucleotide
  modified_base 84: mod_base = OTHER; note = 2'-O-methyl modified nucleotide
  modified_base 85: mod_base = OTHER; note = 2'-O-methyl modified nucleotide
  modified_base 86: mod_base = OTHER; note = 2'-O-methyl modified nucleotide
  modified_base 87: mod_base = OTHER; note = 2'-O-methyl modified nucleotide
  modified_base 88: mod_base = OTHER; note = 2'-O-methyl modified nucleotide
  modified_base 89: mod_base = OTHER; note = 2'-O-methyl modified nucleotide
  modified_base 90: mod_base = OTHER; note = 2'-O-methyl modified nucleotide
  modified_base 91: mod_base = OTHER; note = 2'-O-methyl modified nucleotide
  modified_base 92: mod_base = OTHER; note = 2'-O-methyl modified nucleotide
  modified_base 93: mod_base = OTHER; note = 2'-O-methyl modified nucleotide
  modified_base 94: mod_base = OTHER; note = 2'-O-methyl modified nucleotide
  modified_base 95: mod_base = OTHER; note = 2'-O-methyl modified nucleotide
  modified_base 96: mod_base = OTHER; note = 2'-O-methyl modified nucleotide
  modified_base 112: mod_base = OTHER; note = Nucleotide with phosphorothioate linkage
  modified_base 113: mod_base = OTHER; note = 2'-O-methyl modified nucleotide with phosphorothioate linkage
  modified_base 114: mod_base = OTHER; note = 2'-O-methyl modified nucleotide with phosphorothioate linkage
  modified_base 115: mod_base = OTHER; note = 2'-O-methyl modified nucleotide
gagaatcaaaatcggtgaatgttttagagctagaaatagcaagttaaaataaggctagtccgttatcaacttgaaaaagtggcaccgagtcggtgcaagtctgattcaccgattt

SEQ ID NO: 16306 - RNA, 114 nt, synthetic construct
  source 1..114: mol_type = other RNA
  modified_base 1: mod_base = OTHER; note = 2'-O-methyl modified nucleotide with phosphorothioate linkage
  modified_base 2: mod_base = OTHER; note = 2'-O-methyl modified nucleotide with phosphorothioate linkage
  modified_base 3: mod_base = OTHER; note = 2'-O-methyl modified nucleotide with phosphorothioate linkage
  modified_base 29: mod_base = OTHER; note = 2'-O-methyl modified nucleotide
  modified_base 30: mod_base = OTHER; note = 2'-O-methyl modified nucleotide
  modified_base 31: mod_base = OTHER; note = 2'-O-methyl modified nucleotide
  modified_base 32: mod_base = OTHER; note = 2'-O-methyl modified nucleotide
  modified_base 33: mod_base = OTHER; note = 2'-O-methyl modified nucleotide
  modified_base 34: mod_base = OTHER; note = 2'-O-methyl modified nucleotide
  modified_base 35: mod_base = OTHER; note = 2'-O-methyl modified nucleotide
  modified_base 36: mod_base = OTHER; note = 2'-O-methyl modified nucleotide
  modified_base 37: mod_base = OTHER; note = 2'-O-methyl modified nucleotide
  modified_base 38: mod_base = OTHER; note = 2'-O-methyl modified nucleotide
  modified_base 39: mod_base = OTHER; note = 2'-O-methyl modified nucleotide
  modified_base 40: mod_base = OTHER; note = 2'-O-methyl modified nucleotide
  modified_base 69: mod_base = OTHER; note = 2'-O-methyl modified nucleotide
  modified_base 70: mod_base = OTHER; note = 2'-O-methyl modified nucleotide
  modified_base 71: mod_base = OTHER; note = 2'-O-methyl modified nucleotide
  modified_base 72: mod_base = OTHER; note = 2'-O-methyl modified nucleotide
  modified_base 73: mod_base = OTHER; note = 2'-O-methyl modified nucleotide
  modified_base 74: mod_base = OTHER; note = 2'-O-methyl modified nucleotide
  modified_base 75: mod_base = OTHER; note = 2'-O-methyl modified nucleotide
  modified_base 76: mod_base = OTHER; note = 2'-O-methyl modified nucleotide
  modified_base 77: mod_base = OTHER; note = 2'-O-methyl modified nucleotide
  modified_base 78: mod_base = OTHER; note = 2'-O-methyl modified nucleotide
  modified_base 79: mod_base = OTHER; note = 2'-O-methyl modified nucleotide
  modified_base 80: mod_base = OTHER; note = 2'-O-methyl modified nucleotide
  modified_base 81: mod_base = OTHER; note = 2'-O-methyl modified nucleotide
  modified_base 82: mod_base = OTHER; note = 2'-O-methyl modified nucleotide
  modified_base 83: mod_base = OTHER; note = 2'-O-methyl modified nucleotide
  modified_base 84: mod_base = OTHER; note = 2'-O-methyl modified nucleotide
  modified_base 85: mod_base = OTHER; note = 2'-O-methyl modified nucleotide
  modified_base 86: mod_base = OTHER; note = 2'-O-methyl modified nucleotide
  modified_base 87: mod_base = OTHER; note = 2'-O-methyl modified nucleotide
  modified_base 88: mod_base = OTHER; note = 2'-O-methyl modified nucleotide
  modified_base 89: mod_base = OTHER; note = 2'-O-methyl modified nucleotide
  modified_base 90: mod_base = OTHER; note = 2'-O-methyl modified nucleotide
  modified_base 91: mod_base = OTHER; note = 2'-O-methyl modified nucleotide
  modified_base 92: mod_base = OTHER; note = 2'-O-methyl modified nucleotide
  modified_base 93: mod_base = OTHER; note = 2'-O-methyl modified nucleotide
  modified_base 94: mod_base = OTHER; note = 2'-O-methyl modified nucleotide
  modified_base 95: mod_base = OTHER; note = 2'-O-methyl modified nucleotide
  modified_base 96: mod_base = OTHER; note = 2'-O-methyl modified nucleotide
  modified_base 111: mod_base = OTHER; note = Nucleotide with phosphorothioate linkage
  modified_base 112: mod_base = OTHER; note = 2'-O-methyl modified nucleotide with phosphorothioate linkage
  modified_base 113: mod_base = OTHER; note = 2'-O-methyl modified nucleotide with phosphorothioate linkage
  modified_base 114: mod_base = OTHER; note = 2'-O-methyl modified nucleotide
gagaatcaaaatcggtgaatgttttagagctagaaatagcaagttaaaataaggctagtccgttatcaacttgaaaaagtggcaccgagtcggtgcaagtctgattcaccgatt

SEQ ID NO: 16307 - RNA, 121 nt, synthetic construct
  source 1..121: mol_type = other RNA
  modified_base 1: mod_base = OTHER; note = 2'-O-methyl modified nucleotide with phosphorothioate linkage
  modified_base 2: mod_base = OTHER; note = 2'-O-methyl modified nucleotide with phosphorothioate linkage
  modified_base 3: mod_base = OTHER; note = 2'-O-methyl modified nucleotide with phosphorothioate linkage
  modified_base 29: mod_base = OTHER; note = 2'-O-methyl modified nucleotide
  modified_base 30: mod_base = OTHER; note = 2'-O-methyl modified nucleotide
  modified_base 31: mod_base = OTHER; note = 2'-O-methyl modified nucleotide
  modified_base 32: mod_base = OTHER; note = 2'-O-methyl modified nucleotide
  modified_base 33: mod_base = OTHER; note = 2'-O-methyl modified nucleotide
  modified_base 34: mod_base = OTHER; note = 2'-O-methyl modified nucleotide
  modified_base 35: mod_base = OTHER; note = 2'-O-methyl modified nucleotide
  modified_base 36: mod_base = OTHER; note = 2'-O-methyl modified nucleotide
  modified_base 37: mod_base = OTHER; note = 2'-O-methyl modified nucleotide
  modified_base 38: mod_base = OTHER; note = 2'-O-methyl modified nucleotide
  modified_base 39: mod_base = OTHER; note = 2'-O-methyl modified nucleotide
  modified_base 40: mod_base = OTHER; note = 2'-O-methyl modified nucleotide
  modified_base 69: mod_base = OTHER; note = 2'-O-methyl modified nucleotide
  modified_base 70: mod_base = OTHER; note = 2'-O-methyl modified nucleotide
  modified_base 71: mod_base = OTHER; note = 2'-O-methyl modified nucleotide
  modified_base 72: mod_base = OTHER; note = 2'-O-methyl modified nucleotide
  modified_base 73: mod_base = OTHER; note = 2'-O-methyl modified nucleotide
  modified_base 74: mod_base = OTHER; note = 2'-O-methyl modified nucleotide
  modified_base 75: mod_base = OTHER; note = 2'-O-methyl modified nucleotide
  modified_base 76: mod_base = OTHER; note = 2'-O-methyl modified nucleotide
  modified_base 77: mod_base = OTHER; note = 2'-O-methyl modified nucleotide
  modified_base 78: mod_base = OTHER; note = 2'-O-methyl modified nucleotide
  modified_base 79: mod_base = OTHER; note = 2'-O-methyl modified nucleotide
  modified_base 80: mod_base = OTHER; note = 2'-O-methyl modified nucleotide
  modified_base 81: mod_base = OTHER; note = 2'-O-methyl modified nucleotide
  modified_base 82: mod_base = OTHER; note = 2'-O-methyl modified nucleotide
  modified_base 83: mod_base = OTHER; note = 2'-O-methyl modified nucleotide
  modified_base 84: mod_base = OTHER; note = 2'-O-methyl modified nucleotide
  modified_base 85: mod_base = OTHER; note = 2'-O-methyl modified nucleotide
  modified_base 86: mod_base = OTHER; note = 2'-O-methyl modified nucleotide
  modified_base 87: mod_base = OTHER; note = 2'-O-methyl modified nucleotide
  modified_base 88: mod_base = OTHER; note = 2'-O-methyl modified nucleotide
  modified_base 89: mod_base = OTHER; note = 2'-O-methyl modified nucleotide
  modified_base 90: mod_base = OTHER; note = 2'-O-methyl modified nucleotide
  modified_base 91: mod_base = OTHER; note = 2'-O-methyl modified nucleotide
  modified_base 92: mod_base = OTHER; note = 2'-O-methyl modified nucleotide
  modified_base 93: mod_base = OTHER; note = 2'-O-methyl modified nucleotide
  modified_base 94: mod_base = OTHER; note = 2'-O-methyl modified nucleotide
  modified_base 95: mod_base = OTHER; note = 2'-O-methyl modified nucleotide
  modified_base 96: mod_base = OTHER; note = 2'-O-methyl modified nucleotide
  modified_base 118: mod_base = OTHER; note = Nucleotide with phosphorothioate linkage
  modified_base 119: mod_base = OTHER; note = 2'-O-methyl modified nucleotide with phosphorothioate linkage
  modified_base 120: mod_base = OTHER; note = 2'-O-methyl modified nucleotide with phosphorothioate linkage
  modified_base 121: mod_base = OTHER; note = 2'-O-methyl modified nucleotide
gagaatcaaaatcggtgaatgttttagagctagaaatagcaagttaaaataaggctagtccgttatcaacttgaaaaagtggcaccgagtcggtgcacaagtctgattcaccgattttgat

SEQ ID NO: 16308 - RNA, 120 nt, synthetic construct
  source 1..120: mol_type = other RNA
  modified_base 1: mod_base = OTHER; note = 2'-O-methyl modified nucleotide with phosphorothioate linkage
  modified_base 2: mod_base = OTHER; note = 2'-O-methyl modified nucleotide with phosphorothioate linkage
  modified_base 3: mod_base = OTHER; note = 2'-O-methyl modified nucleotide with phosphorothioate linkage
  modified_base 29: mod_base = OTHER; note = 2'-O-methyl modified nucleotide
  modified_base 30: mod_base = OTHER; note = 2'-O-methyl modified nucleotide
  modified_base 31: mod_base = OTHER; note = 2'-O-methyl modified nucleotide
  modified_base 32: mod_base = OTHER; note = 2'-O-methyl modified nucleotide
  modified_base 33: mod_base = OTHER; note = 2'-O-methyl modified nucleotide
  modified_base 34: mod_base = OTHER; note = 2'-O-methyl modified nucleotide
  modified_base 35: mod_base = OTHER; note = 2'-O-methyl modified nucleotide
  modified_base 36: mod_base = OTHER; note = 2'-O-methyl modified nucleotide
  modified_base 37: mod_base = OTHER; note = 2'-O-methyl modified nucleotide
  modified_base 38: mod_base = OTHER; note = 2'-O-methyl modified nucleotide
  modified_base 39: mod_base = OTHER; note = 2'-O-methyl modified nucleotide
  modified_base 40: mod_base = OTHER; note = 2'-O-methyl modified nucleotide
  modified_base 69: mod_base = OTHER; note = 2'-O-methyl modified nucleotide
  modified_base 70: mod_base = OTHER; note = 2'-O-methyl modified nucleotide
  modified_base 71: mod_base = OTHER; note = 2'-O-methyl modified nucleotide
  modified_base 72: mod_base = OTHER; note = 2'-O-methyl modified nucleotide
  modified_base 73: mod_base = OTHER; note = 2'-O-methyl modified nucleotide
  modified_base 74: mod_base = OTHER; note = 2'-O-methyl modified nucleotide
  modified_base 75: mod_base = OTHER; note = 2'-O-methyl modified nucleotide
  modified_base 76: mod_base = OTHER; note = 2'-O-methyl modified nucleotide
  modified_base 77: mod_base = OTHER; note = 2'-O-methyl modified nucleotide
  modified_base 78: mod_base = OTHER; note = 2'-O-methyl modified nucleotide
  modified_base 79: mod_base = OTHER; note = 2'-O-methyl modified nucleotide
  modified_base 80: mod_base = OTHER; note = 2'-O-methyl modified nucleotide
  modified_base 81: mod_base = OTHER; note = 2'-O-methyl modified nucleotide
  modified_base 82: mod_base = OTHER; note = 2'-O-methyl modified nucleotide
  modified_base 83: mod_base = OTHER; note = 2'-O-methyl modified nucleotide
  modified_base 84: mod_base = OTHER; note = 2'-O-methyl modified nucleotide
  modified_base 85: mod_base = OTHER; note = 2'-O-methyl modified nucleotide
  modified_base 86: mod_base = OTHER; note = 2'-O-methyl modified nucleotide
  modified_base 87: mod_base = OTHER; note = 2'-O-methyl modified nucleotide
  modified_base 88: mod_base = OTHER; note = 2'-O-methyl modified nucleotide
  modified_base 89: mod_base = OTHER; note = 2'-O-methyl modified nucleotide
  modified_base 90: mod_base = OTHER; note = 2'-O-methyl modified nucleotide
  modified_base 91: mod_base = OTHER; note = 2'-O-methyl modified nucleotide
  modified_base 92: mod_base = OTHER; note = 2'-O-methyl modified nucleotide
  modified_base 93: mod_base = OTHER; note = 2'-O-methyl modified nucleotide
  modified_base 94: mod_base = OTHER; note = 2'-O-methyl modified nucleotide
  modified_base 95: mod_base = OTHER; note = 2'-O-methyl modified nucleotide
  modified_base 96: mod_base = OTHER; note = 2'-O-methyl modified nucleotide
  modified_base 117: mod_base = OTHER; note = Nucleotide with phosphorothioate linkage
  modified_base 118: mod_base = OTHER; note = 2'-O-methyl modified nucleotide with phosphorothioate linkage
  modified_base 119: mod_base = OTHER; note = 2'-O-methyl modified nucleotide with phosphorothioate linkage
  modified_base 120: mod_base = OTHER; note = 2'-O-methyl modified nucleotide
gagaatcaaaatcggtgaatgttttagagctagaaatagcaagttaaaataaggctagtccgttatcaacttgaaaaagtggcaccgagtcggtgcacaagtctgattcaccgattttga

SEQ ID NO: 16309 - RNA, 119 nt, synthetic construct
  source 1..119: mol_type = other RNA
  modified_base 1: mod_base = OTHER; note = 2'-O-methyl modified nucleotide with phosphorothioate linkage
  modified_base 2: mod_base = OTHER; note = 2'-O-methyl modified nucleotide with phosphorothioate linkage
  modified_base 3: mod_base = OTHER; note = 2'-O-methyl modified nucleotide with phosphorothioate linkage
  modified_base 29: mod_base = OTHER; note = 2'-O-methyl modified nucleotide
  modified_base 30: mod_base = OTHER; note = 2'-O-methyl modified nucleotide
  modified_base 31: mod_base = OTHER; note = 2'-O-methyl modified nucleotide
  modified_base 32: mod_base = OTHER; note = 2'-O-methyl modified nucleotide
  modified_base 33: mod_base = OTHER; note = 2'-O-methyl modified nucleotide
  modified_base 34: mod_base = OTHER; note = 2'-O-methyl modified nucleotide
  modified_base 35: mod_base = OTHER; note = 2'-O-methyl modified nucleotide
  modified_base 36: mod_base = OTHER; note = 2'-O-methyl modified nucleotide
  modified_base 37: mod_base = OTHER; note = 2'-O-methyl modified nucleotide
  modified_base 38: mod_base = OTHER; note = 2'-O-methyl modified nucleotide
  modified_base 39: mod_base = OTHER; note = 2'-O-methyl modified nucleotide
  modified_base 40: mod_base = OTHER; note = 2'-O-methyl modified nucleotide
  modified_base 69: mod_base = OTHER; note = 2'-O-methyl modified nucleotide
  modified_base 70: mod_base = OTHER; note = 2'-O-methyl modified nucleotide
  modified_base 71: mod_base = OTHER; note = 2'-O-methyl modified nucleotide
  modified_base 72: mod_base = OTHER; note = 2'-O-methyl modified nucleotide
  modified_base 73: mod_base = OTHER; note = 2'-O-methyl modified nucleotide
  modified_base 74: mod_base = OTHER; note = 2'-O-methyl modified nucleotide
  modified_base 75: mod_base = OTHER; note = 2'-O-methyl modified nucleotide
  modified_base 76: mod_base = OTHER; note = 2'-O-methyl modified nucleotide
  modified_base 77: mod_base = OTHER; note = 2'-O-methyl modified nucleotide
  modified_base 78: mod_base = OTHER; note = 2'-O-methyl modified nucleotide
  modified_base 79: mod_base = OTHER; note = 2'-O-methyl modified nucleotide
  modified_base 80: mod_base = OTHER; note = 2'-O-methyl modified nucleotide
  modified_base 81: mod_base = OTHER; note = 2'-O-methyl modified nucleotide
  modified_base 82: mod_base = OTHER; note = 2'-O-methyl modified nucleotide
  modified_base 83: mod_base = OTHER; note = 2'-O-methyl modified nucleotide
  modified_base 84: mod_base = OTHER; note = 2'-O-methyl modified nucleotide
  modified_base 85: mod_base = OTHER; note = 2'-O-methyl modified nucleotide
  modified_base 86: mod_base = OTHER; note = 2'-O-methyl modified nucleotide
  modified_base 87: mod_base = OTHER; note = 2'-O-methyl modified nucleotide
  modified_base 88: mod_base = OTHER; note = 2'-O-methyl modified nucleotide
  modified_base 89: mod_base = OTHER; note = 2'-O-methyl modified nucleotide
  modified_base 90: mod_base = OTHER; note = 2'-O-methyl modified nucleotide
  modified_base 91: mod_base = OTHER; note = 2'-O-methyl modified nucleotide
  modified_base 92: mod_base = OTHER; note = 2'-O-methyl modified nucleotide
  modified_base 93: mod_base = OTHER; note = 2'-O-methyl modified nucleotide
  modified_base 94: mod_base = OTHER; note = 2'-O-methyl modified nucleotide
  modified_base 95: mod_base = OTHER; note = 2'-O-methyl modified nucleotide
  modified_base 96: mod_base = OTHER; note = 2'-O-methyl modified nucleotide
  modified_base 116: mod_base = OTHER; note = Nucleotide with phosphorothioate linkage
  modified_base 117: mod_base = OTHER; note = 2'-O-methyl modified nucleotide with phosphorothioate linkage
  modified_base 118: mod_base = OTHER; note = 2'-O-methyl modified nucleotide with phosphorothioate linkage
  modified_base 119: mod_base = OTHER; note = 2'-O-methyl modified nucleotide
gagaatcaaaatcggtgaatgttttagagctagaaatagcaagttaaaataaggctagtccgttatcaacttgaaaaagtggcaccgagtcggtgcacaagtctgattcaccgattttg

SEQ ID NO: 16310 - RNA, 118 nt, synthetic construct
  source 1..118: mol_type = other RNA
  modified_base 1: mod_base = OTHER; note = 2'-O-methyl modified nucleotide with phosphorothioate linkage
  modified_base 2: mod_base = OTHER; note = 2'-O-methyl modified nucleotide with phosphorothioate linkage
  modified_base 3: mod_base = OTHER; note = 2'-O-methyl modified nucleotide with phosphorothioate linkage
  modified_base 29: mod_base = OTHER; note = 2'-O-methyl modified nucleotide
  modified_base 30: mod_base = OTHER; note = 2'-O-methyl modified nucleotide
  modified_base 31: mod_base = OTHER; note = 2'-O-methyl modified nucleotide
  modified_base 32: mod_base = OTHER; note = 2'-O-methyl modified nucleotide
  modified_base 33: mod_base = OTHER; note = 2'-O-methyl modified nucleotide
  modified_base 34: mod_base = OTHER; note = 2'-O-methyl modified nucleotide
  modified_base 35: mod_base = OTHER; note = 2'-O-methyl modified nucleotide
  modified_base 36: mod_base = OTHER; note = 2'-O-methyl modified nucleotide
  modified_base 37: mod_base = OTHER; note = 2'-O-methyl modified nucleotide
  modified_base 38: mod_base = OTHER; note = 2'-O-methyl modified nucleotide
  modified_base 39: mod_base = OTHER; note = 2'-O-methyl modified nucleotide
  modified_base 40: mod_base = OTHER; note = 2'-O-methyl modified nucleotide
  modified_base 69: mod_base = OTHER; note = 2'-O-methyl modified nucleotide
  modified_base 70: mod_base = OTHER; note = 2'-O-methyl modified nucleotide
  modified_base 71: mod_base = OTHER; note = 2'-O-methyl modified nucleotide
  modified_base 72: mod_base = OTHER; note = 2'-O-methyl modified nucleotide
  modified_base 73: mod_base = OTHER; note = 2'-O-methyl modified nucleotide
  modified_base 74: mod_base = OTHER; note = 2'-O-methyl modified nucleotide
  modified_base 75: mod_base = OTHER; note = 2'-O-methyl modified nucleotide
  modified_base 76: mod_base = OTHER; note = 2'-O-methyl modified nucleotide
  modified_base 77: mod_base = OTHER; note = 2'-O-methyl modified nucleotide
  modified_base 78: mod_base = OTHER; note = 2'-O-methyl modified nucleotide
  modified_base 79: mod_base = OTHER; note = 2'-O-methyl modified nucleotide
  modified_base 80: mod_base = OTHER; note = 2'-O-methyl modified nucleotide
  modified_base 81: mod_base = OTHER; note = 2'-O-methyl modified nucleotide
  modified_base 82: mod_base = OTHER; note = 2'-O-methyl modified nucleotide
  modified_base 83: mod_base = OTHER; note = 2'-O-methyl modified nucleotide
  modified_base 84: mod_base = OTHER; note = 2'-O-methyl modified nucleotide
  modified_base 85: mod_base = OTHER; note = 2'-O-methyl modified nucleotide
  modified_base 86: mod_base = OTHER; note = 2'-O-methyl modified nucleotide
  modified_base 87: mod_base = OTHER; note = 2'-O-methyl modified nucleotide
  modified_base 88: mod_base = OTHER; note = 2'-O-methyl modified nucleotide
  modified_base 89: mod_base = OTHER; note = 2'-O-methyl modified nucleotide
  modified_base 90: mod_base = OTHER; note = 2'-O-methyl modified nucleotide
  modified_base 91: mod_base = OTHER; note = 2'-O-methyl modified nucleotide
  modified_base 92: mod_base = OTHER; note = 2'-O-methyl modified nucleotide
  modified_base 93: mod_base = OTHER; note = 2'-O-methyl modified nucleotide
  modified_base 94: mod_base = OTHER; note = 2'-O-methyl modified nucleotide
  modified_base 95: mod_base = OTHER; note = 2'-O-methyl modified nucleotide
  modified_base 96: mod_base = OTHER; note = 2'-O-methyl modified nucleotide
  modified_base 115: mod_base = OTHER; note = Nucleotide with phosphorothioate linkage
  modified_base 116: mod_base = OTHER; note = 2'-O-methyl modified nucleotide with phosphorothioate linkage
  modified_base 117: mod_base = OTHER; note = 2'-O-methyl modified nucleotide with phosphorothioate linkage
  modified_base 118: mod_base = OTHER; note = 2'-O-methyl modified nucleotide
gagaatcaaaatcggtgaatgttttagagctagaaatagcaagttaaaataaggctagtccgttatcaacttgaaaaagtggcaccgagtcggtgcacaagtctgattcaccgatttt

SEQ ID NO: 16311 - RNA, 117 nt, synthetic construct
  source 1..117: mol_type = other RNA
  modified_base 1: mod_base = OTHER; note = 2'-O-methyl modified nucleotide with phosphorothioate linkage
  modified_base 2: mod_base = OTHER; note = 2'-O-methyl modified nucleotide with phosphorothioate linkage
  modified_base 3: mod_base = OTHER; note = 2'-O-methyl modified nucleotide with phosphorothioate linkage
  modified_base 29: mod_base = OTHER; note = 2'-O-methyl modified nucleotide
  modified_base 30: mod_base = OTHER; note = 2'-O-methyl modified nucleotide
  modified_base 31: mod_base = OTHER; note = 2'-O-methyl modified nucleotide
  modified_base 32: mod_base = OTHER; note = 2'-O-methyl modified nucleotide
  modified_base 33: mod_base = OTHER; note = 2'-O-methyl modified nucleotide
  modified_base 34: mod_base = OTHER; note = 2'-O-methyl modified nucleotide
  modified_base 35: mod_base = OTHER; note = 2'-O-methyl modified nucleotide
  modified_base 36: mod_base = OTHER; note = 2'-O-methyl modified nucleotide
  modified_base 37: mod_base = OTHER; note = 2'-O-methyl modified nucleotide
  modified_base 38: mod_base = OTHER; note = 2'-O-methyl modified nucleotide
  modified_base 39: mod_base = OTHER; note = 2'-O-methyl modified nucleotide
  modified_base 40: mod_base = OTHER; note = 2'-O-methyl modified nucleotide
  modified_base 69: mod_base = OTHER; note = 2'-O-methyl modified nucleotide
  modified_base 70: mod_base = OTHER; note = 2'-O-methyl modified nucleotide
  modified_base 71: mod_base = OTHER; note = 2'-O-methyl modified nucleotide
  modified_base 72: mod_base = OTHER; note = 2'-O-methyl modified nucleotide
  modified_base 73: mod_base = OTHER; note = 2'-O-methyl modified nucleotide
  modified_base 74: mod_base = OTHER; note = 2'-O-methyl modified nucleotide
  modified_base 75: mod_base = OTHER; note = 2'-O-methyl modified nucleotide
  modified_base 76: mod_base = OTHER; note = 2'-O-methyl modified nucleotide
  modified_base 77: mod_base = OTHER; note = 2'-O-methyl modified nucleotide
  modified_base 78: mod_base = OTHER; note = 2'-O-methyl modified nucleotide
  modified_base 79: mod_base = OTHER; note = 2'-O-methyl modified nucleotide
  modified_base 80: mod_base = OTHER; note = 2'-O-methyl modified nucleotide
  modified_base 81: mod_base = OTHER; note = 2'-O-methyl modified nucleotide
  modified_base 82: mod_base = OTHER; note = 2'-O-methyl modified nucleotide
  modified_base 83: mod_base = OTHER; note = 2'-O-methyl modified nucleotide
  modified_base 84: mod_base = OTHER; note = 2'-O-methyl modified nucleotide
  modified_base 85: mod_base = OTHER; note = 2'-O-methyl modified nucleotide
  modified_base 86: mod_base = OTHER; note = 2'-O-methyl modified nucleotide
  modified_base 87: mod_base = OTHER; note = 2'-O-methyl modified nucleotide
  modified_base 88: mod_base = OTHER; note = 2'-O-methyl modified nucleotide
  modified_base 89: mod_base = OTHER; note = 2'-O-methyl modified nucleotide
  modified_base 90: mod_base = OTHER; note = 2'-O-methyl modified nucleotide
  modified_base 91: mod_base = OTHER; note = 2'-O-methyl modified nucleotide
  modified_base 92: mod_base = OTHER; note = 2'-O-methyl modified nucleotide
  modified_base 93: mod_base = OTHER; note = 2'-O-methyl modified nucleotide
  modified_base 94: mod_base = OTHER; note = 2'-O-methyl modified nucleotide
  modified_base 95: mod_base = OTHER; note = 2'-O-methyl modified nucleotide
  modified_base 96: mod_base = OTHER; note = 2'-O-methyl modified nucleotide
  modified_base 114: mod_base = OTHER; note = Nucleotide with phosphorothioate linkage
  modified_base 115: mod_base = OTHER; note = 2'-O-methyl modified nucleotide with phosphorothioate linkage
  modified_base 116: mod_base = OTHER; note = 2'-O-methyl modified nucleotide with phosphorothioate linkage
  modified_base 117: mod_base = OTHER; note = 2'-O-methyl modified nucleotide
gagaatcaaaatcggtgaatgttttagagctagaaatagcaagttaaaataaggctagtccgttatcaacttgaaaaagtggcaccgagtcggtgcacaagtctgattcaccgattt

SEQ ID NO: 16312 - RNA, 116 nt, synthetic construct
  source 1..116: mol_type = other RNA
  modified_base 1: mod_base = OTHER; note = 2'-O-methyl modified nucleotide with phosphorothioate linkage
  modified_base 2: mod_base = OTHER; note = 2'-O-methyl modified nucleotide with phosphorothioate linkage
  modified_base 3: mod_base = OTHER; note = 2'-O-methyl modified nucleotide with phosphorothioate linkage
  modified_base 29: mod_base = OTHER; note = 2'-O-methyl modified nucleotide
  modified_base 30: mod_base = OTHER; note = 2'-O-methyl modified nucleotide
  modified_base 31: mod_base = OTHER; note = 2'-O-methyl modified nucleotide
  modified_base 32: mod_base = OTHER; note = 2'-O-methyl modified nucleotide
  modified_base 33: mod_base = OTHER; note = 2'-O-methyl modified nucleotide
  modified_base 34: mod_base = OTHER; note = 2'-O-methyl modified nucleotide
  modified_base 35: mod_base = OTHER; note = 2'-O-methyl modified nucleotide
  modified_base 36: mod_base = OTHER; note = 2'-O-methyl modified nucleotide
  modified_base 37: mod_base = OTHER; note = 2'-O-methyl modified nucleotide
  modified_base 38: mod_base = OTHER; note = 2'-O-methyl modified nucleotide
  modified_base 39: mod_base = OTHER; note = 2'-O-methyl modified nucleotide
  modified_base 40: mod_base = OTHER; note = 2'-O-methyl modified nucleotide
  modified_base 69: mod_base = OTHER; note = 2'-O-methyl modified nucleotide
  modified_base 70: mod_base = OTHER; note = 2'-O-methyl modified nucleotide
  modified_base 71: mod_base = OTHER; note = 2'-O-methyl modified nucleotide
  modified_base 72: mod_base = OTHER; note = 2'-O-methyl modified nucleotide
  modified_base 73: mod_base = OTHER; note = 2'-O-methyl modified nucleotide
  modified_base 74: mod_base = OTHER; note = 2'-O-methyl modified nucleotide
  modified_base 75: mod_base = OTHER; note = 2'-O-methyl modified nucleotide
  modified_base 76: mod_base = OTHER; note = 2'-O-methyl modified nucleotide
  modified_base 77: mod_base = OTHER; note = 2'-O-methyl modified nucleotide
  modified_base 78: mod_base = OTHER; note = 2'-O-methyl modified nucleotide
  modified_base 79: mod_base = OTHER; note = 2'-O-methyl modified nucleotide
  modified_base 80: mod_base = OTHER; note = 2'-O-methyl modified nucleotide
  modified_base 81: mod_base = OTHER; note = 2'-O-methyl modified nucleotide
  modified_base 82: mod_base = OTHER; note = 2'-O-methyl modified nucleotide
  modified_base 83: mod_base = OTHER; note = 2'-O-methyl modified nucleotide
  modified_base 84: mod_base = OTHER; note = 2'-O-methyl modified nucleotide
  modified_base 85: mod_base = OTHER; note = 2'-O-methyl modified nucleotide
  modified_base 86: mod_base = OTHER; note = 2'-O-methyl modified nucleotide
  modified_base 87: mod_base = OTHER; note = 2'-O-methyl modified nucleotide
  modified_base 88: mod_base = OTHER; note = 2'-O-methyl modified nucleotide
  modified_base 89: mod_base = OTHER; note = 2'-O-methyl modified nucleotide
  modified_base 90: mod_base = OTHER; note = 2'-O-methyl modified nucleotide
  modified_base 91: mod_base = OTHER; note = 2'-O-methyl modified nucleotide
  modified_base 92: mod_base = OTHER; note = 2'-O-methyl modified nucleotide
  modified_base 93: mod_base = OTHER; note = 2'-O-methyl modified nucleotide
  modified_base 94: mod_base = OTHER; note = 2'-O-methyl modified nucleotide
  modified_base 95: mod_base = OTHER; note = 2'-O-methyl modified nucleotide
  modified_base 96: mod_base = OTHER; note = 2'-O-methyl modified nucleotide
  modified_base 113: mod_base = OTHER; note = Nucleotide with phosphorothioate linkage
  modified_base 114: mod_base = OTHER; note = 2'-O-methyl modified nucleotide with phosphorothioate linkage
  modified_base 115: mod_base = OTHER; note = 2'-O-methyl modified nucleotide with phosphorothioate linkage
  modified_base 116: mod_base = OTHER; note = 2'-O-methyl modified nucleotide
gagaatcaaaatcggtgaatgttttagagctagaaatagcaagttaaaataaggctagtccgttatcaacttgaaaaagtggcaccgagtcggtgcacaagtctgattcaccgatt

SEQ ID NO: 16313 - RNA, 123 nt, synthetic construct
  source 1..123: mol_type = other RNA
  modified_base 1: mod_base = OTHER; note = 2'-O-methyl modified nucleotide with phosphorothioate linkage
  modified_base 2: mod_base = OTHER; note = 2'-O-methyl modified nucleotide with phosphorothioate linkage
  modified_base 3: mod_base = OTHER; note = 2'-O-methyl modified nucleotide with phosphorothioate linkage
  modified_base 29: mod_base = OTHER; note = 2'-O-methyl modified nucleotide
  modified_base 30: mod_base = OTHER; note = 2'-O-methyl modified nucleotide
  modified_base 31: mod_base = OTHER; note = 2'-O-methyl modified nucleotide
  modified_base 32: mod_base = OTHER; note = 2'-O-methyl modified nucleotide
  modified_base 33: mod_base = OTHER; note = 2'-O-methyl modified nucleotide
  modified_base 34: mod_base = OTHER; note = 2'-O-methyl modified nucleotide
  modified_base 35: mod_base = OTHER; note = 2'-O-methyl modified nucleotide
  modified_base 36: mod_base = OTHER; note = 2'-O-methyl modified nucleotide
  modified_base 37: mod_base = OTHER; note = 2'-O-methyl modified nucleotide
  modified_base 38: mod_base = OTHER; note = 2'-O-methyl modified nucleotide
  modified_base 39: mod_base = OTHER; note = 2'-O-methyl modified nucleotide
  modified_base 40: mod_base = OTHER; note = 2'-O-methyl modified nucleotide
  modified_base 69: mod_base = OTHER; note = 2'-O-methyl modified nucleotide
  modified_base 70: mod_base = OTHER; note = 2'-O-methyl modified nucleotide
  modified_base 71: mod_base = OTHER; note = 2'-O-methyl modified nucleotide
  modified_base 72: mod_base = OTHER; note = 2'-O-methyl modified nucleotide
  modified_base 73: mod_base = OTHER; note = 2'-O-methyl modified nucleotide
  modified_base 74: mod_base = OTHER; note = 2'-O-methyl modified nucleotide
  modified_base 75: mod_base = OTHER; note = 2'-O-methyl modified nucleotide
  modified_base 76: mod_base = OTHER; note = 2'-O-methyl modified nucleotide
  modified_base 77: mod_base = OTHER; note = 2'-O-methyl modified nucleotide
  modified_base 78: mod_base = OTHER; note = 2'-O-methyl modified nucleotide
  modified_base 79: mod_base = OTHER; note = 2'-O-methyl modified nucleotide
  modified_base 80: mod_base = OTHER; note = 2'-O-methyl modified nucleotide
  modified_base 81: mod_base = OTHER; note = 2'-O-methyl modified nucleotide
  modified_base 82: mod_base = OTHER; note = 2'-O-methyl modified nucleotide
  modified_base 83: mod_base = OTHER; note = 2'-O-methyl modified nucleotide
  modified_base 84: mod_base = OTHER; note = 2'-O-methyl modified nucleotide
  modified_base 85: mod_base = OTHER; note = 2'-O-methyl modified nucleotide
  modified_base 86: mod_base = OTHER; note = 2'-O-methyl modified nucleotide
  modified_base 87: mod_base = OTHER; note = 2'-O-methyl modified nucleotide
  modified_base 88: mod_base = OTHER; note = 2'-O-methyl modified nucleotide
  modified_base 89: mod_base = OTHER; note = 2'-O-methyl modified nucleotide
  modified_base 90: mod_base = OTHER; note = 2'-O-methyl modified nucleotide
  modified_base 91: mod_base = OTHER; note = 2'-O-methyl modified nucleotide
  modified_base 92: mod_base = OTHER; note = 2'-O-methyl modified nucleotide
  modified_base 93: mod_base = OTHER; note = 2'-O-methyl modified nucleotide
  modified_base 94: mod_base = OTHER; note = 2'-O-methyl modified nucleotide
  modified_base 95: mod_base = OTHER; note = 2'-O-methyl modified nucleotide
  modified_base 96: mod_base = OTHER; note = 2'-O-methyl modified nucleotide
  modified_base 120: mod_base = OTHER; note = Nucleotide with phosphorothioate linkage
  modified_base 121: mod_base = OTHER; note = 2'-O-methyl modified nucleotide with phosphorothioate linkage
  modified_base 122: mod_base = OTHER; note = 2'-O-methyl modified nucleotide with phosphorothioate linkage
  modified_base 123: mod_base = OTHER; note = 2'-O-methyl modified nucleotide
gagaatcaaaatcggtgaatgttttagagctagaaatagcaagttaaaataaggctagtccgttatcaacttgaaaaagtggcaccgagtcggtgctgacaagtctgattcaccgattttgat

SEQ ID NO: 16314 - RNA, 122 nt, synthetic construct
  source 1..122: mol_type = other RNA
  modified_base 1: mod_base = OTHER; note = 2'-O-methyl modified nucleotide with phosphorothioate linkage
  modified_base 2: mod_base = OTHER; note = 2'-O-methyl modified nucleotide with phosphorothioate linkage
  modified_base 3: mod_base = OTHER; note = 2'-O-methyl modified nucleotide with phosphorothioate linkage
  modified_base 29: mod_base = OTHER; note = 2'-O-methyl modified nucleotide
  modified_base 30: mod_base = OTHER; note = 2'-O-methyl modified nucleotide
  modified_base 31: mod_base = OTHER; note = 2'-O-methyl modified nucleotide
  modified_base 32: mod_base = OTHER; note = 2'-O-methyl modified nucleotide
  modified_base 33: mod_base = OTHER; note = 2'-O-methyl modified nucleotide
  modified_base 34: mod_base = OTHER; note = 2'-O-methyl modified nucleotide
  modified_base 35: mod_base = OTHER; note = 2'-O-methyl modified nucleotide
  modified_base 36: mod_base = OTHER; note = 2'-O-methyl modified nucleotide
  modified_base 37: mod_base = OTHER; note = 2'-O-methyl modified nucleotide
  modified_base 38: mod_base = OTHER; note = 2'-O-methyl modified nucleotide
  modified_base 39: mod_base = OTHER; note = 2'-O-methyl modified nucleotide
  modified_base 40: mod_base = OTHER; note = 2'-O-methyl modified nucleotide
  modified_base 69: mod_base = OTHER; note = 2'-O-methyl modified nucleotide
  modified_base 70: mod_base = OTHER; note = 2'-O-methyl modified nucleotide
  modified_base 71: mod_base = OTHER; note = 2'-O-methyl modified nucleotide
  modified_base 72: mod_base = OTHER; note = 2'-O-methyl modified nucleotide
  modified_base 73: mod_base = OTHER; note = 2'-O-methyl modified nucleotide
  modified_base 74: mod_base = OTHER; note = 2'-O-methyl modified nucleotide
  modified_base 75: mod_base = OTHER; note = 2'-O-methyl modified nucleotide
  modified_base 76: mod_base = OTHER; note = 2'-O-methyl modified nucleotide
  modified_base 77: mod_base = OTHER; note = 2'-O-methyl modified nucleotide
  modified_base 78: mod_base = OTHER; note = 2'-O-methyl modified nucleotide
  modified_base 79: mod_base = OTHER; note = 2'-O-methyl modified nucleotide
  modified_base 80: mod_base = OTHER; note = 2'-O-methyl modified nucleotide
  modified_base 81: mod_base = OTHER; note = 2'-O-methyl modified nucleotide
  modified_base 82: mod_base = OTHER; note = 2'-O-methyl modified nucleotide
  modified_base 83: mod_base = OTHER; note = 2'-O-methyl modified nucleotide
  modified_base 84: mod_base = OTHER; note = 2'-O-methyl modified nucleotide
  modified_base 85: mod_base = OTHER; note = 2'-O-methyl modified nucleotide
  modified_base 86: mod_base = OTHER; note = 2'-O-methyl modified nucleotide
  modified_base 87: mod_base = OTHER; note = 2'-O-methyl modified nucleotide
  modified_base 88: mod_base = OTHER; note = 2'-O-methyl modified nucleotide
  modified_base 89: mod_base = OTHER; note = 2'-O-methyl modified nucleotide
  modified_base 90: mod_base = OTHER; note = 2'-O-methyl modified nucleotide
  modified_base 91: mod_base = OTHER; note = 2'-O-methyl modified nucleotide
  modified_base 92: mod_base = OTHER; note = 2'-O-methyl modified nucleotide
  modified_base 93: mod_base = OTHER; note = 2'-O-methyl modified nucleotide
  modified_base 94: mod_base = OTHER; note = 2'-O-methyl modified nucleotide
  modified_base 95: mod_base = OTHER; note = 2'-O-methyl modified nucleotide
  modified_base 96: mod_base = OTHER; note = 2'-O-methyl modified nucleotide
  modified_base 119: mod_base = OTHER; note = Nucleotide with phosphorothioate linkage
  modified_base 120: mod_base = OTHER; note = 2'-O-methyl modified nucleotide with phosphorothioate linkage
  modified_base 121: mod_base = OTHER; note = 2'-O-methyl modified nucleotide with phosphorothioate linkage
  modified_base 122: mod_base = OTHER; note = 2'-O-methyl modified nucleotide
gagaatcaaaatcggtgaatgttttagagctagaaatagcaagttaaaataaggctagtccgttatcaacttgaaaaagtggcaccgagtcggtgctgacaagtctgattcaccgattttga

SEQ ID NO: 16315 - RNA, 121 nt, synthetic construct
  source 1..121: mol_type = other RNA
  modified_base 1: mod_base = OTHER; note = 2'-O-methyl modified nucleotide with phosphorothioate linkage
  modified_base 2: mod_base = OTHER; note = 2'-O-methyl modified nucleotide with phosphorothioate linkage
  modified_base 3: mod_base = OTHER; note = 2'-O-methyl modified nucleotide with phosphorothioate linkage
  modified_base 29: mod_base = OTHER; note = 2'-O-methyl modified nucleotide
  modified_base 30: mod_base = OTHER; note = 2'-O-methyl modified nucleotide
  modified_base 31: mod_base = OTHER; note = 2'-O-methyl modified nucleotide
  modified_base 32: mod_base = OTHER; note = 2'-O-methyl modified nucleotide
  modified_base 33: mod_base = OTHER; note = 2'-O-methyl modified nucleotide
  modified_base 34: mod_base = OTHER; note = 2'-O-methyl modified nucleotide
  modified_base 35: mod_base = OTHER; note = 2'-O-methyl modified nucleotide
  modified_base 36: mod_base = OTHER; note = 2'-O-methyl modified nucleotide
  modified_base 37: mod_base = OTHER; note = 2'-O-methyl modified nucleotide
  modified_base 38: mod_base = OTHER; note = 2'-O-methyl modified nucleotide
  modified_base 39: mod_base = OTHER; note = 2'-O-methyl modified nucleotide
  modified_base 40: mod_base = OTHER; note = 2'-O-methyl modified nucleotide
  modified_base 69: mod_base = OTHER; note = 2'-O-methyl modified nucleotide
  modified_base 70: mod_base = OTHER; note = 2'-O-methyl modified nucleotide
  modified_base 71: mod_base = OTHER; note = 2'-O-methyl modified nucleotide
  modified_base 72: mod_base = OTHER; note = 2'-O-methyl modified nucleotide
  modified_base 73: mod_base = OTHER; note = 2'-O-methyl modified nucleotide
  modified_base 74: mod_base = OTHER; note = 2'-O-methyl modified nucleotide
  modified_base 75: mod_base = OTHER; note = 2'-O-methyl modified nucleotide
  modified_base 76: mod_base = OTHER; note = 2'-O-methyl modified nucleotide
  modified_base 77: mod_base = OTHER; note = 2'-O-methyl modified nucleotide
  modified_base 78: mod_base = OTHER; note = 2'-O-methyl modified nucleotide
  modified_base 79: mod_base = OTHER; note = 2'-O-methyl modified nucleotide
  modified_base 80: mod_base = OTHER; note = 2'-O-methyl modified nucleotide
  modified_base 81: mod_base = OTHER; note = 2'-O-methyl modified nucleotide
  modified_base 82: mod_base = OTHER; note = 2'-O-methyl modified nucleotide
  modified_base 83: mod_base = OTHER; note = 2'-O-methyl modified nucleotide
  modified_base 84: mod_base = OTHER; note = 2'-O-methyl modified nucleotide
  modified_base 85: mod_base = OTHER; note = 2'-O-methyl modified nucleotide
  modified_base 86: mod_base = OTHER; note = 2'-O-methyl modified nucleotide
  modified_base 87: mod_base = OTHER; note = 2'-O-methyl modified nucleotide
  modified_base 88: mod_base = OTHER; note = 2'-O-methyl modified nucleotide
  modified_base 89: mod_base = OTHER; note = 2'-O-methyl modified nucleotide
  modified_base 90: mod_base = OTHER; note = 2'-O-methyl modified nucleotide
  modified_base 91: mod_base = OTHER; note = 2'-O-methyl modified nucleotide
  modified_base 92: mod_base = OTHER; note = 2'-O-methyl modified nucleotide
  modified_base 93: mod_base = OTHER; note = 2'-O-methyl modified nucleotide
  modified_base 94: mod_base = OTHER; note = 2'-O-methyl modified nucleotide
  modified_base 95: mod_base = OTHER; note = 2'-O-methyl modified nucleotide
  modified_base 96: mod_base = OTHER; note = 2'-O-methyl modified nucleotide
  modified_base 118: mod_base = OTHER; note = Nucleotide with phosphorothioate linkage
  modified_base 119: mod_base = OTHER; note = 2'-O-methyl modified nucleotide with phosphorothioate linkage
  modified_base 120: mod_base = OTHER; note = 2'-O-methyl modified nucleotide with phosphorothioate linkage
  modified_base 121: mod_base = OTHER; note = 2'-O-methyl modified nucleotide
gagaatcaaaatcggtgaatgttttagagctagaaatagcaagttaaaataaggctagtccgttatcaacttgaaaaagtggcaccgagtcggtgctgacaagtctgattcaccgattttg

SEQ ID NO: 16316 - RNA, 120 nt, synthetic construct
  source 1..120: mol_type = other RNA
  modified_base 1: mod_base = OTHER; note = 2'-O-methyl modified nucleotide with phosphorothioate linkage
  modified_base 2: mod_base = OTHER; note = 2'-O-methyl modified nucleotide with phosphorothioate linkage
  modified_base 3: mod_base = OTHER; note = 2'-O-methyl modified nucleotide with phosphorothioate linkage
  modified_base 29: mod_base = OTHER; note = 2'-O-methyl modified nucleotide
  modified_base 30: mod_base = OTHER; note = 2'-O-methyl modified nucleotide
  modified_base 31: mod_base = OTHER; note = 2'-O-methyl modified nucleotide
  modified_base 32: mod_base = OTHER; note = 2'-O-methyl modified nucleotide
  modified_base 33: mod_base = OTHER; note = 2'-O-methyl modified nucleotide
  modified_base 34: mod_base = OTHER; note = 2'-O-methyl modified nucleotide
  modified_base 35: mod_base = OTHER; note = 2'-O-methyl modified nucleotide
  modified_base 36: mod_base = OTHER; note = 2'-O-methyl modified nucleotide
  modified_base 37: mod_base = OTHER; note = 2'-O-methyl modified nucleotide
  modified_base 38: mod_base = OTHER; note = 2'-O-methyl modified nucleotide
  modified_base 39: mod_base = OTHER; note = 2'-O-methyl modified nucleotide
  modified_base 40: mod_base = OTHER; note = 2'-O-methyl modified nucleotide
  modified_base 69: mod_base = OTHER; note = 2'-O-methyl modified nucleotide
  modified_base 70: mod_base = OTHER; note = 2'-O-methyl modified nucleotide
  modified_base 71: mod_base = OTHER; note = 2'-O-methyl modified nucleotide
  modified_base 72: mod_base = OTHER; note = 2'-O-methyl modified nucleotide
  modified_base 73: mod_base = OTHER; note = 2'-O-methyl modified nucleotide
  modified_base 74: mod_base = OTHER; note = 2'-O-methyl modified nucleotide
  modified_base 75: mod_base = OTHER; note = 2'-O-methyl modified nucleotide
  modified_base 76: mod_base = OTHER; note = 2'-O-methyl modified nucleotide
  modified_base 77: mod_base = OTHER; note = 2'-O-methyl modified nucleotide
  modified_base 78: mod_base = OTHER; note = 2'-O-methyl modified nucleotide
  modified_base 79: mod_base = OTHER; note = 2'-O-methyl modified nucleotide
  modified_base 80: mod_base = OTHER; note = 2'-O-methyl modified nucleotide
  modified_base 81: mod_base = OTHER; note = 2'-O-methyl modified nucleotide
  modified_base 82: mod_base = OTHER; note = 2'-O-methyl modified nucleotide
  modified_base 83: mod_base = OTHER; note = 2'-O-methyl modified nucleotide
  modified_base 84: mod_base = OTHER; note = 2'-O-methyl modified nucleotide
  modified_base 85: mod_base = OTHER; note = 2'-O-methyl modified nucleotide
  modified_base 86: mod_base = OTHER; note = 2'-O-methyl modified nucleotide
  modified_base 87: mod_base = OTHER; note = 2'-O-methyl modified nucleotide
  modified_base 88: mod_base = OTHER; note = 2'-O-methyl modified nucleotide
  modified_base 89: mod_base = OTHER; note = 2'-O-methyl modified nucleotide
  modified_base 90: mod_base = OTHER; note = 2'-O-methyl modified nucleotide
  modified_base 91: mod_base = OTHER; note = 2'-O-methyl modified nucleotide
  modified_base 92: mod_base = OTHER; note = 2'-O-methyl modified nucleotide
  modified_base 93: mod_base = OTHER; note = 2'-O-methyl modified nucleotide
  modified_base 94: mod_base = OTHER; note = 2'-O-methyl modified nucleotide
  modified_base 95: mod_base = OTHER; note = 2'-O-methyl modified nucleotide
  modified_base 96: mod_base = OTHER; note = 2'-O-methyl modified nucleotide
  modified_base 117: mod_base = OTHER; note = Nucleotide with phosphorothioate linkage
  modified_base 118: mod_base = OTHER; note = 2'-O-methyl modified nucleotide with phosphorothioate linkage
  modified_base 119: mod_base = OTHER; note = 2'-O-methyl modified nucleotide with phosphorothioate linkage
  modified_base 120: mod_base = OTHER; note = 2'-O-methyl modified nucleotide
gagaatcaaaatcggtgaatgttttagagctagaaatagcaagttaaaataaggctagtccgttatcaacttgaaaaagtggcaccgagtcggtgctgacaagtctgattcaccgatttt

SEQ ID NO: 16317 - RNA, 119 nt, synthetic construct
  source 1..119: mol_type = other RNA
  modified_base 1: mod_base = OTHER; note = 2'-O-methyl modified nucleotide with phosphorothioate linkage
  modified_base 2: mod_base = OTHER; note = 2'-O-methyl modified nucleotide with phosphorothioate linkage
  modified_base 3: mod_base = OTHER; note = 2'-O-methyl modified nucleotide with phosphorothioate linkage
  modified_base 29: mod_base = OTHER; note = 2'-O-methyl modified nucleotide
  modified_base 30: mod_base = OTHER; note = 2'-O-methyl modified nucleotide
  modified_base 31: mod_base = OTHER; note = 2'-O-methyl modified nucleotide
  modified_base 32: mod_base = OTHER; note = 2'-O-methyl modified nucleotide
  modified_base 33: mod_base = OTHER; note = 2'-O-methyl modified nucleotide
  modified_base 34: mod_base = OTHER; note = 2'-O-methyl modified nucleotide
  modified_base 35: mod_base = OTHER; note = 2'-O-methyl modified nucleotide
  modified_base 36: mod_base = OTHER; note = 2'-O-methyl modified nucleotide
  modified_base 37: mod_base = OTHER; note = 2'-O-methyl modified nucleotide
  modified_base 38: mod_base = OTHER; note = 2'-O-methyl modified nucleotide
  modified_base 39: mod_base = OTHER; note = 2'-O-methyl modified nucleotide
  modified_base 40: mod_base = OTHER; note = 2'-O-methyl modified nucleotide
  modified_base 69: mod_base = OTHER; note = 2'-O-methyl modified nucleotide
  modified_base 70: mod_base = OTHER; note = 2'-O-methyl modified nucleotide
  modified_base 71: mod_base = OTHER; note = 2'-O-methyl modified nucleotide
  modified_base 72: mod_base = OTHER; note = 2'-O-methyl modified nucleotide
  modified_base 73: mod_base = OTHER; note = 2'-O-methyl modified nucleotide
  modified_base 74: mod_base = OTHER; note = 2'-O-methyl modified nucleotide
  modified_base 75: mod_base = OTHER; note = 2'-O-methyl modified nucleotide
  modified_base 76: mod_base = OTHER; note = 2'-O-methyl modified nucleotide
  modified_base 77: mod_base = OTHER; note = 2'-O-methyl modified nucleotide
  modified_base 78: mod_base = OTHER; note = 2'-O-methyl modified nucleotide
  modified_base 79: mod_base = OTHER; note = 2'-O-methyl modified nucleotide
  modified_base 80: mod_base = OTHER; note = 2'-O-methyl modified nucleotide
  modified_base 81: mod_base = OTHER; note = 2'-O-methyl modified nucleotide
  modified_base 82: mod_base = OTHER; note = 2'-O-methyl modified nucleotide
  modified_base 83: mod_base = OTHER; note = 2'-O-methyl modified nucleotide
  modified_base 84: mod_base = OTHER; note = 2'-O-methyl modified nucleotide
  modified_base 85: mod_base = OTHER; note = 2'-O-methyl modified nucleotide
  modified_base 86: mod_base = OTHER; note = 2'-O-methyl modified nucleotide
  modified_base 87: mod_base = OTHER; note = 2'-O-methyl modified nucleotide
  modified_base 88: mod_base = OTHER; note = 2'-O-methyl modified nucleotide
  modified_base 89: mod_base = OTHER; note = 2'-O-methyl modified nucleotide
  modified_base 90: mod_base = OTHER; note = 2'-O-methyl modified nucleotide
  modified_base 91: mod_base = OTHER; note = 2'-O-methyl modified nucleotide
  modified_base 92: mod_base = OTHER; note = 2'-O-methyl modified nucleotide
  modified_base 93: mod_base = OTHER; note = 2'-O-methyl modified nucleotide
  modified_base 94: mod_base = OTHER; note = 2'-O-methyl modified nucleotide
  modified_base 95: mod_base = OTHER; note = 2'-O-methyl modified nucleotide
  modified_base 96: mod_base = OTHER; note = 2'-O-methyl modified nucleotide
  modified_base 116: mod_base = OTHER; note = Nucleotide with phosphorothioate linkage
  modified_base 117: mod_base = OTHER; note = 2'-O-methyl modified nucleotide with phosphorothioate linkage
  modified_base 118: mod_base = OTHER; note = 2'-O-methyl modified nucleotide with phosphorothioate linkage
  modified_base 119: mod_base = OTHER; note = 2'-O-methyl modified nucleotide
gagaatcaaaatcggtgaatgttttagagctagaaatagcaagttaaaataaggctagtccgttatcaacttgaaaaagtggcaccgagtcggtgctgacaagtctgattcaccgattt

SEQ ID NO: 16318 - RNA, 118 nt, synthetic construct
  source 1..118: mol_type = other RNA
  modified_base 1: mod_base = OTHER; note = 2'-O-methyl modified nucleotide with phosphorothioate linkage
  modified_base 2: mod_base = OTHER; note = 2'-O-methyl modified nucleotide with phosphorothioate linkage
  modified_base 3: mod_base = OTHER; note = 2'-O-methyl modified nucleotide with phosphorothioate linkage
  modified_base 29: mod_base = OTHER; note = 2'-O-methyl modified nucleotide
  modified_base 30: mod_base = OTHER; note = 2'-O-methyl modified nucleotide
  modified_base 31: mod_base = OTHER; note = 2'-O-methyl modified nucleotide
  modified_base 32: mod_base = OTHER; note = 2'-O-methyl modified nucleotide
  modified_base 33: mod_base = OTHER; note = 2'-O-methyl modified nucleotide
  modified_base 34: mod_base = OTHER; note = 2'-O-methyl modified nucleotide
  modified_base 35: mod_base = OTHER; note = 2'-O-methyl modified nucleotide
  modified_base 36: mod_base = OTHER; note = 2'-O-methyl modified nucleotide
  modified_base 37: mod_base = OTHER; note = 2'-O-methyl modified nucleotide
  modified_base 38: mod_base = OTHER; note = 2'-O-methyl modified nucleotide
  modified_base 39: mod_base = OTHER; note = 2'-O-methyl modified nucleotide
  modified_base 40: mod_base = OTHER; note = 2'-O-methyl modified nucleotide
  modified_base 69: mod_base = OTHER; note = 2'-O-methyl modified nucleotide
  modified_base 70: mod_base = OTHER; note = 2'-O-methyl modified nucleotide
  modified_base 71: mod_base = OTHER; note = 2'-O-methyl modified nucleotide
  modified_base 72: mod_base = OTHER; note = 2'-O-methyl modified nucleotide
  modified_base 73: mod_base = OTHER; note = 2'-O-methyl modified nucleotide
  modified_base 74: mod_base = OTHER; note = 2'-O-methyl modified nucleotide
  modified_base 75: mod_base = OTHER; note = 2'-O-methyl modified nucleotide
  modified_base 76: mod_base = OTHER; note = 2'-O-methyl modified nucleotide
  modified_base 77: mod_base = OTHER; note = 2'-O-methyl modified nucleotide
  modified_base 78: mod_base = OTHER; note = 2'-O-methyl modified nucleotide
  modified_base 79: mod_base = OTHER; note = 2'-O-methyl modified nucleotide
  modified_base 80: mod_base = OTHER; note = 2'-O-methyl modified nucleotide
  modified_base 81: mod_base = OTHER; note = 2'-O-methyl modified nucleotide
  modified_base 82: mod_base = OTHER; note = 2'-O-methyl modified nucleotide
  modified_base 83: mod_base = OTHER; note = 2'-O-methyl modified nucleotide
  modified_base 84: mod_base = OTHER; note = 2'-O-methyl modified nucleotide
  modified_base 85: mod_base = OTHER; note = 2'-O-methyl modified nucleotide
  modified_base 86: mod_base = OTHER; note = 2'-O-methyl modified nucleotide
  modified_base 87: mod_base = OTHER; note = 2'-O-methyl modified nucleotide
  modified_base 88: mod_base = OTHER; note = 2'-O-methyl modified nucleotide
  modified_base 89: mod_base = OTHER; note = 2'-O-methyl modified nucleotide
  modified_base 90: mod_base = OTHER; note = 2'-O-methyl modified nucleotide
  modified_base 91: mod_base = OTHER; note = 2'-O-methyl modified nucleotide
  modified_base 92: mod_base = OTHER; note = 2'-O-methyl modified nucleotide
  modified_base 93: mod_base = OTHER; note = 2'-O-methyl modified nucleotide
  modified_base 94: mod_base = OTHER; note = 2'-O-methyl modified nucleotide
  modified_base 95: mod_base = OTHER; note = 2'-O-methyl modified nucleotide
  modified_base 96: mod_base = OTHER; note = 2'-O-methyl modified nucleotide
  modified_base 115: mod_base = OTHER; note = Nucleotide with phosphorothioate linkage
  modified_base 116: mod_base = OTHER; note = 2'-O-methyl modified nucleotide with phosphorothioate linkage
  modified_base 117: mod_base = OTHER; note = 2'-O-methyl modified nucleotide with phosphorothioate linkage
  modified_base 118: mod_base = OTHER; note = 2'-O-methyl modified nucleotide
gagaatcaaaatcggtgaatgttttagagctagaaatagcaagttaaaataaggctagtccgttatcaacttgaaaaagtggcaccgagtcggtgctgacaagtctgattcaccgatt

SEQ ID NO: 16319 - RNA, 125 nt, synthetic construct
  source 1..125: mol_type = other RNA
  modified_base 1: mod_base = OTHER; note = 2'-O-methyl modified nucleotide with phosphorothioate linkage
  modified_base 2: mod_base = OTHER; note = 2'-O-methyl modified nucleotide with phosphorothioate linkage
  modified_base 3: mod_base = OTHER; note = 2'-O-methyl modified nucleotide with phosphorothioate linkage
  modified_base 29: mod_base = OTHER; note = 2'-O-methyl modified nucleotide
  modified_base 30: mod_base = OTHER; note = 2'-O-methyl modified nucleotide
  modified_base 31: mod_base = OTHER; note = 2'-O-methyl modified nucleotide
  modified_base 32: mod_base = OTHER; note = 2'-O-methyl modified nucleotide
  modified_base 33: mod_base = OTHER; note = 2'-O-methyl modified nucleotide
  modified_base 34: mod_base = OTHER; note = 2'-O-methyl modified nucleotide
  modified_base 35: mod_base = OTHER; note = 2'-O-methyl modified nucleotide
  modified_base 36: mod_base = OTHER; note = 2'-O-methyl modified nucleotide
  modified_base 37: mod_base = OTHER; note = 2'-O-methyl modified nucleotide
  modified_base 38: mod_base = OTHER; note = 2'-O-methyl modified nucleotide
  modified_base 39: mod_base = OTHER; note = 2'-O-methyl modified nucleotide
  modified_base 40: mod_base = OTHER; note = 2'-O-methyl modified nucleotide
  modified_base 69: mod_base = OTHER; note = 2'-O-methyl modified nucleotide
  modified_base 70: mod_base = OTHER; note = 2'-O-methyl modified nucleotide
  modified_base 71: mod_base = OTHER; note = 2'-O-methyl modified nucleotide
  modified_base 72: mod_base = OTHER; note = 2'-O-methyl modified nucleotide
  modified_base 73: mod_base = OTHER; note = 2'-O-methyl modified nucleotide
  modified_base 74: mod_base = OTHER; note = 2'-O-methyl modified nucleotide
  modified_base 75: mod_base = OTHER; note = 2'-O-methyl modified nucleotide
  modified_base 76: mod_base = OTHER; note = 2'-O-methyl modified nucleotide
  modified_base 77: mod_base = OTHER; note = 2'-O-methyl modified nucleotide
  modified_base 78: mod_base = OTHER; note = 2'-O-methyl modified nucleotide
  modified_base 79: mod_base = OTHER; note = 2'-O-methyl modified nucleotide
  modified_base 80: mod_base = OTHER; note = 2'-O-methyl modified nucleotide
  modified_base 81: mod_base = OTHER; note = 2'-O-methyl modified nucleotide
  modified_base 82: mod_base = OTHER; note = 2'-O-methyl modified nucleotide
  modified_base 83: mod_base = OTHER; note = 2'-O-methyl modified nucleotide
  modified_base 84: mod_base = OTHER; note = 2'-O-methyl modified nucleotide
  modified_base 85: mod_base = OTHER; note = 2'-O-methyl modified nucleotide
  modified_base 86: mod_base = OTHER; note = 2'-O-methyl modified nucleotide
  modified_base 87: mod_base = OTHER; note = 2'-O-methyl modified nucleotide
  modified_base 88: mod_base = OTHER; note = 2'-O-methyl modified nucleotide
  modified_base 89: mod_base = OTHER; note = 2'-O-methyl modified nucleotide
  modified_base 90: mod_base = OTHER; note = 2'-O-methyl modified nucleotide
  modified_base 91: mod_base = OTHER; note = 2'-O-methyl modified nucleotide
  modified_base 92: mod_base = OTHER; note = 2'-O-methyl modified nucleotide
  modified_base 93: mod_base = OTHER; note = 2'-O-methyl modified nucleotide
  modified_base 94: mod_base = OTHER; note = 2'-O-methyl modified nucleotide
  modified_base 95: mod_base = OTHER; note = 2'-O-methyl modified nucleotide
  modified_base 96: mod_base = OTHER; note = 2'-O-methyl modified nucleotide
  modified_base 122: mod_base = OTHER; note = Nucleotide with phosphorothioate linkage
  modified_base 123: mod_base = OTHER; note = 2'-O-methyl modified nucleotide with phosphorothioate linkage
  modified_base 124: mod_base = OTHER; note = 2'-O-methyl modified nucleotide with phosphorothioate linkage
  modified_base 125: mod_base = OTHER; note = 2'-O-methyl modified nucleotide
gagaatcaaaatcggtgaatgttttagagctagaaatagcaagttaaaataaggctagtccgttatcaacttgaaaaagtggcaccgagtcggtgcagtgacaagtctgattcaccgattttgat

SEQ ID NO: 16320 - RNA, 124 nt, synthetic construct
  source 1..124: mol_type = other RNA
  modified_base 1: mod_base = OTHER; note = 2'-O-methyl modified nucleotide with phosphorothioate linkage
  modified_base 2: mod_base = OTHER; note = 2'-O-methyl modified nucleotide with phosphorothioate linkage
  modified_base 3: mod_base = OTHER; note = 2'-O-methyl modified nucleotide with phosphorothioate linkage
  modified_base 29: mod_base = OTHER; note = 2'-O-methyl modified nucleotide
  modified_base 30: mod_base = OTHER; note = 2'-O-methyl modified nucleotide
  modified_base 31: mod_base = OTHER; note = 2'-O-methyl modified nucleotide
  modified_base 32: mod_base = OTHER; note = 2'-O-methyl modified nucleotide
  modified_base 33: mod_base = OTHER; note = 2'-O-methyl modified nucleotide
  modified_base 34: mod_base = OTHER; note = 2'-O-methyl modified nucleotide
  modified_base 35: mod_base = OTHER; note = 2'-O-methyl modified nucleotide
  modified_base 36: mod_base = OTHER; note = 2'-O-methyl modified nucleotide
  modified_base 37: mod_base = OTHER; note = 2'-O-methyl modified nucleotide
  modified_base 38: mod_base = OTHER; note = 2'-O-methyl modified nucleotide
  modified_base 39: mod_base = OTHER; note = 2'-O-methyl modified nucleotide
  modified_base 40: mod_base = OTHER; note = 2'-O-methyl modified nucleotide
  modified_base 69: mod_base = OTHER; note = 2'-O-methyl modified nucleotide
  modified_base 70: mod_base = OTHER; note = 2'-O-methyl modified nucleotide
  modified_base 71: mod_base = OTHER; note = 2'-O-methyl modified nucleotide
  modified_base 72: mod_base = OTHER; note = 2'-O-methyl modified nucleotide
  modified_base 73: mod_base = OTHER; note = 2'-O-methyl modified nucleotide
  modified_base 74: mod_base = OTHER; note = 2'-O-methyl modified nucleotide
  modified_base 75: mod_base = OTHER; note = 2'-O-methyl modified nucleotide
  modified_base 76: mod_base = OTHER; note = 2'-O-methyl modified nucleotide
  modified_base 77: mod_base = OTHER; note = 2'-O-methyl modified nucleotide
  modified_base 78: mod_base = OTHER; note = 2'-O-methyl modified nucleotide
  modified_base 79: mod_base = OTHER; note = 2'-O-methyl modified nucleotide
  modified_base 80: mod_base = OTHER; note = 2'-O-methyl modified nucleotide
  modified_base 81: mod_base = OTHER; note = 2'-O-methyl modified nucleotide
  modified_base 82: mod_base = OTHER; note = 2'-O-methyl modified nucleotide
  modified_base 83: mod_base = OTHER; note = 2'-O-methyl modified nucleotide
  modified_base 84: mod_base = OTHER; note = 2'-O-methyl modified nucleotide
  modified_base 85: mod_base = OTHER; note = 2'-O-methyl modified nucleotide
  modified_base 86: mod_base = OTHER; note = 2'-O-methyl modified nucleotide
  modified_base 87: mod_base = OTHER; note = 2'-O-methyl modified nucleotide
  modified_base 88: mod_base = OTHER; note = 2'-O-methyl modified nucleotide
  modified_base 89: mod_base = OTHER; note = 2'-O-methyl modified nucleotide
  modified_base 90: mod_base = OTHER; note = 2'-O-methyl modified nucleotide
  modified_base 91: mod_base = OTHER; note = 2'-O-methyl modified nucleotide
  modified_base 92: mod_base = OTHER; note = 2'-O-methyl modified nucleotide
  modified_base 93: mod_base = OTHER; note = 2'-O-methyl modified nucleotide
  modified_base 94: mod_base = OTHER; note = 2'-O-methyl modified nucleotide
  modified_base 95: mod_base = OTHER; note = 2'-O-methyl modified nucleotide
  modified_base 96: mod_base = OTHER; note = 2'-O-methyl modified nucleotide
  modified_base 121: mod_base = OTHER; note = Nucleotide with phosphorothioate linkage
  modified_base 122: mod_base = OTHER; note = 2'-O-methyl modified nucleotide with phosphorothioate linkage
  modified_base 123: mod_base = OTHER; note = 2'-O-methyl modified nucleotide with phosphorothioate linkage
  modified_base 124: mod_base = OTHER; note = 2'-O-methyl modified nucleotide
gagaatcaaaatcggtgaatgttttagagctagaaatagcaagttaaaataaggctagtccgttatcaacttgaaaaagtggcaccgagtcggtgcagtgacaagtctgattcaccgattttga

SEQ ID NO: 16321 - RNA, 123 nt, synthetic construct
  source 1..123: mol_type = other RNA
  modified_base 1: mod_base = OTHER; note = 2'-O-methyl modified nucleotide with phosphorothioate linkage
  modified_base 2: mod_base = OTHER; note = 2'-O-methyl modified nucleotide with phosphorothioate linkage
  modified_base 3: mod_base = OTHER; note = 2'-O-methyl modified nucleotide with phosphorothioate linkage
  modified_base 29: mod_base = OTHER; note = 2'-O-methyl modified nucleotide
  modified_base 30: mod_base = OTHER; note = 2'-O-methyl modified nucleotide
  modified_base 31: mod_base = OTHER; note = 2'-O-methyl modified nucleotide
  modified_base 32: mod_base = OTHER; note = 2'-O-methyl modified nucleotide
  modified_base 33: mod_base = OTHER; note = 2'-O-methyl modified nucleotide
  modified_base 34: mod_base = OTHER; note = 2'-O-methyl modified nucleotide
  modified_base 35: mod_base = OTHER; note = 2'-O-methyl modified nucleotide
  modified_base 36: mod_base = OTHER; note = 2'-O-methyl modified nucleotide
  modified_base 37: mod_base = OTHER; note = 2'-O-methyl modified nucleotide
  modified_base 38: mod_base = OTHER; note = 2'-O-methyl modified nucleotide
  modified_base 39: mod_base = OTHER; note = 2'-O-methyl modified nucleotide
  modified_base 40: mod_base = OTHER; note = 2'-O-methyl modified nucleotide
  modified_base 69: mod_base = OTHER; note = 2'-O-methyl modified nucleotide
  modified_base 70: mod_base = OTHER; note = 2'-O-methyl modified nucleotide
  modified_base 71: mod_base = OTHER; note = 2'-O-methyl modified nucleotide
  modified_base 72: mod_base = OTHER; note = 2'-O-methyl modified nucleotide
  modified_base 73: mod_base = OTHER; note = 2'-O-methyl modified nucleotide
  modified_base 74: mod_base = OTHER; note = 2'-O-methyl modified nucleotide
  modified_base 75: mod_base = OTHER; note = 2'-O-methyl modified nucleotide
  modified_base 76: mod_base = OTHER; note = 2'-O-methyl modified nucleotide
  modified_base 77: mod_base = OTHER; note = 2'-O-methyl modified nucleotide
  modified_base 78: mod_base = OTHER; note = 2'-O-methyl modified nucleotide
  modified_base 79: mod_base = OTHER; note = 2'-O-methyl modified nucleotide
  modified_base 80: mod_base = OTHER; note = 2'-O-methyl modified nucleotide
  modified_base 81: mod_base = OTHER; note = 2'-O-methyl modified nucleotide
  modified_base 82: mod_base = OTHER; note = 2'-O-methyl modified nucleotide
  modified_base 83: mod_base = OTHER; note = 2'-O-methyl modified nucleotide
  modified_base 84: mod_base = OTHER; note = 2'-O-methyl modified nucleotide
  modified_base 85: mod_base = OTHER; note = 2'-O-methyl modified nucleotide
  modified_base 86: mod_base = OTHER; note = 2'-O-methyl modified nucleotide
  modified_base 87: mod_base = OTHER; note = 2'-O-methyl modified nucleotide
  modified_base 88: mod_base = OTHER; note = 2'-O-methyl modified nucleotide
  modified_base 89: mod_base = OTHER; note = 2'-O-methyl modified nucleotide
  modified_base 90: mod_base = OTHER; note = 2'-O-methyl modified nucleotide
  modified_base 91: mod_base = OTHER; note = 2'-O-methyl modified nucleotide
  modified_base 92: mod_base = OTHER; note = 2'-O-methyl modified nucleotide
  modified_base 93: mod_base = OTHER; note = 2'-O-methyl modified nucleotide
  modified_base 94: mod_base = OTHER; note = 2'-O-methyl modified nucleotide
  modified_base 95: mod_base = OTHER; note = 2'-O-methyl modified nucleotide
  modified_base 96: mod_base = OTHER; note = 2'-O-methyl modified nucleotide
  modified_base 120: mod_base = OTHER; note = Nucleotide with phosphorothioate linkage
  modified_base 121: mod_base = OTHER; note = 2'-O-methyl modified nucleotide with phosphorothioate linkage
  modified_base 122: mod_base = OTHER; note = 2'-O-methyl modified nucleotide with phosphorothioate linkage
  modified_base 123: mod_base = OTHER; note = 2'-O-methyl modified nucleotide
gagaatcaaaatcggtgaatgttttagagctagaaatagcaagttaaaataaggctagtccgttatcaacttgaaaaagtggcaccgagtcggtgcagtgacaagtctgattcaccgattttg

SEQ ID NO: 16322 - RNA, 122 nt, synthetic construct
  source 1..122: mol_type = other RNA
  modified_base 1: mod_base = OTHER; note = 2'-O-methyl modified nucleotide with phosphorothioate linkage
  modified_base 2: mod_base = OTHER; note = 2'-O-methyl modified nucleotide with phosphorothioate linkage
  modified_base 3: mod_base = OTHER; note = 2'-O-methyl modified nucleotide with phosphorothioate linkage
  modified_base 29: mod_base = OTHER; note = 2'-O-methyl modified nucleotide
  modified_base 30: mod_base = OTHER; note = 2'-O-methyl modified nucleotide
  modified_base 31: mod_base = OTHER; note = 2'-O-methyl modified nucleotide
  modified_base 32: mod_base = OTHER; note = 2'-O-methyl modified nucleotide
  modified_base 33: mod_base = OTHER; note = 2'-O-methyl modified nucleotide
  modified_base 34: mod_base = OTHER; note = 2'-O-methyl modified nucleotide
  modified_base 35: mod_base = OTHER; note = 2'-O-methyl modified nucleotide
  modified_base 36: mod_base = OTHER; note = 2'-O-methyl modified nucleotide
  modified_base 37: mod_base = OTHER; note = 2'-O-methyl modified nucleotide
  modified_base 38: mod_base = OTHER; note = 2'-O-methyl modified nucleotide
  modified_base 39: mod_base = OTHER; note = 2'-O-methyl modified nucleotide
  modified_base 40: mod_base = OTHER; note = 2'-O-methyl modified nucleotide
  modified_base 69: mod_base = OTHER; note = 2'-O-methyl modified nucleotide
  modified_base 70: mod_base = OTHER; note = 2'-O-methyl modified nucleotide
  modified_base 71: mod_base = OTHER; note = 2'-O-methyl modified nucleotide
  modified_base 72: mod_base = OTHER; note = 2'-O-methyl modified nucleotide
  modified_base 73: mod_base = OTHER; note = 2'-O-methyl modified nucleotide
  modified_base 74: mod_base = OTHER; note = 2'-O-methyl modified nucleotide
  modified_base 75: mod_base = OTHER; note = 2'-O-methyl modified nucleotide
  modified_base 76: mod_base = OTHER; note = 2'-O-methyl modified nucleotide
  modified_base 77: mod_base = OTHER; note = 2'-O-methyl modified nucleotide
  modified_base 78: mod_base = OTHER; note = 2'-O-methyl modified nucleotide
  modified_base 79: mod_base = OTHER; note = 2'-O-methyl modified nucleotide
  modified_base 80: mod_base = OTHER; note = 2'-O-methyl modified nucleotide
  modified_base 81: mod_base = OTHER; note = 2'-O-methyl modified nucleotide
  modified_base 82: mod_base = OTHER; note = 2'-O-methyl modified nucleotide
  modified_base 83: mod_base = OTHER; note = 2'-O-methyl modified nucleotide
  modified_base 84: mod_base = OTHER; note = 2'-O-methyl modified nucleotide
  modified_base 85: mod_base = OTHER; note = 2'-O-methyl modified nucleotide
  modified_base 86: mod_base = OTHER; note = 2'-O-methyl modified nucleotide
  modified_base 87: mod_base = OTHER; note = 2'-O-methyl modified nucleotide
  modified_base 88: mod_base = OTHER; note = 2'-O-methyl modified nucleotide
  modified_base 89: mod_base = OTHER; note = 2'-O-methyl modified nucleotide
  modified_base 90: mod_base = OTHER; note = 2'-O-methyl modified nucleotide
  modified_base 91: mod_base = OTHER; note = 2'-O-methyl modified nucleotide
  modified_base 92: mod_base = OTHER; note = 2'-O-methyl modified nucleotide
  modified_base 93: mod_base = OTHER; note = 2'-O-methyl modified nucleotide
  modified_base 94: mod_base = OTHER; note = 2'-O-methyl modified nucleotide
  modified_base 95: mod_base = OTHER; note = 2'-O-methyl modified nucleotide
  modified_base 96: mod_base = OTHER; note = 2'-O-methyl modified nucleotide
  modified_base 119: mod_base = OTHER; note = Nucleotide with phosphorothioate linkage
  modified_base 120: mod_base = OTHER; note = 2'-O-methyl modified nucleotide with phosphorothioate linkage
  modified_base 121: mod_base = OTHER; note = 2'-O-methyl modified nucleotide with phosphorothioate linkage
  modified_base 122: mod_base = OTHER; note = 2'-O-methyl modified nucleotide
gagaatcaaaatcggtgaatgttttagagctagaaatagcaagttaaaataaggctagtccgttatcaacttgaaaaagtggcaccgagtcggtgcagtgacaagtctgattcaccgatttt

SEQ ID NO: 16323 - RNA, 121 nt, synthetic construct
  source 1..121: mol_type = other RNA
  modified_base 1: mod_base = OTHER; note = 2'-O-methyl modified nucleotide with phosphorothioate linkage
  modified_base 2: mod_base = OTHER; note = 2'-O-methyl modified nucleotide with phosphorothioate linkage
  modified_base 3: mod_base = OTHER; note = 2'-O-methyl modified nucleotide with phosphorothioate linkage
  modified_base 29: mod_base = OTHER; note = 2'-O-methyl modified nucleotide
  modified_base 30: mod_base = OTHER; note = 2'-O-methyl modified nucleotide
  modified_base 31: mod_base = OTHER; note = 2'-O-methyl modified nucleotide
  modified_base 32: mod_base = OTHER; note = 2'-O-methyl modified nucleotide
  modified_base 33: mod_base = OTHER; note = 2'-O-methyl modified nucleotide
  modified_base 34: mod_base = OTHER; note = 2'-O-methyl modified nucleotide
  modified_base 35: mod_base = OTHER; note = 2'-O-methyl modified nucleotide
  modified_base 36: mod_base = OTHER; note = 2'-O-methyl modified nucleotide
  modified_base 37: mod_base = OTHER; note = 2'-O-methyl modified nucleotide
  modified_base 38: mod_base = OTHER; note = 2'-O-methyl modified nucleotide
  modified_base 39: mod_base = OTHER; note = 2'-O-methyl modified nucleotide
  modified_base 40: mod_base = OTHER; note = 2'-O-methyl modified nucleotide
  modified_base 69: mod_base = OTHER; note = 2'-O-methyl modified nucleotide
  modified_base 70: mod_base = OTHER; note = 2'-O-methyl modified nucleotide
  modified_base 71: mod_base = OTHER; note = 2'-O-methyl modified nucleotide
  modified_base 72: mod_base = OTHER; note = 2'-O-methyl modified nucleotide
  modified_base 73: mod_base = OTHER; note = 2'-O-methyl modified nucleotide
  modified_base 74: mod_base = OTHER; note = 2'-O-methyl modified nucleotide
  modified_base 75: mod_base = OTHER; note = 2'-O-methyl modified nucleotide
  modified_base 76: mod_base = OTHER; note = 2'-O-methyl modified nucleotide
  modified_base 77: mod_base = OTHER; note = 2'-O-methyl modified nucleotide
  modified_base 78: mod_base = OTHER; note = 2'-O-methyl modified nucleotide
  modified_base 79: mod_base = OTHER; note = 2'-O-methyl modified nucleotide
  modified_base 80: mod_base = OTHER; note = 2'-O-methyl modified nucleotide
  modified_base 81: mod_base = OTHER; note = 2'-O-methyl modified nucleotide
  modified_base 82: mod_base = OTHER; note = 2'-O-methyl modified nucleotide
  modified_base 83: mod_base = OTHER; note = 2'-O-methyl modified nucleotide
  modified_base 84: mod_base = OTHER; note = 2'-O-methyl modified nucleotide
  modified_base 85: mod_base = OTHER; note = 2'-O-methyl modified nucleotide
  modified_base 86: mod_base = OTHER; note = 2'-O-methyl modified nucleotide
  modified_base 87: mod_base = OTHER; note = 2'-O-methyl modified nucleotide
  modified_base 88: mod_base = OTHER; note = 2'-O-methyl modified nucleotide
  modified_base 89: mod_base = OTHER; note = 2'-O-methyl modified nucleotide
  modified_base 90: mod_base = OTHER; note = 2'-O-methyl modified nucleotide
  modified_base 91: mod_base = OTHER; note = 2'-O-methyl modified nucleotide
  modified_base 92: mod_base = OTHER; note = 2'-O-methyl modified nucleotide
  modified_base 93: mod_base = OTHER; note = 2'-O-methyl modified nucleotide
  modified_base 94: mod_base = OTHER; note = 2'-O-methyl modified nucleotide
  modified_base 95: mod_base = OTHER; note = 2'-O-methyl modified nucleotide
  modified_base 96: mod_base = OTHER; note = 2'-O-methyl modified nucleotide
  modified_base 118: mod_base = OTHER; note = Nucleotide with phosphorothioate linkage
  modified_base 119: mod_base = OTHER; note = 2'-O-methyl modified nucleotide with phosphorothioate linkage
  modified_base 120: mod_base = OTHER; note = 2'-O-methyl modified nucleotide with phosphorothioate linkage
  modified_base 121: mod_base = OTHER; note = 2'-O-methyl modified nucleotide
gagaatcaaaatcggtgaatgttttagagctagaaatagcaagttaaaataaggctagtccgttatcaacttgaaaaagtggcaccgagtcggtgcagtgacaagtctgattcaccgattt

SEQ ID NO: 16324 - RNA, 120 nt, synthetic construct
  source 1..120: mol_type = other RNA
  modified_base 1: mod_base = OTHER; note = 2'-O-methyl modified nucleotide with phosphorothioate linkage
  modified_base 2: mod_base = OTHER; note = 2'-O-methyl modified nucleotide with phosphorothioate linkage
  modified_base 3: mod_base = OTHER; note = 2'-O-methyl modified nucleotide with phosphorothioate linkage
  modified_base 29: mod_base = OTHER; note = 2'-O-methyl modified nucleotide
  modified_base 30: mod_base = OTHER; note = 2'-O-methyl modified nucleotide
  modified_base 31: mod_base = OTHER; note = 2'-O-methyl modified nucleotide
  modified_base 32: mod_base = OTHER; note = 2'-O-methyl modified nucleotide
  modified_base 33: mod_base = OTHER; note = 2'-O-methyl modified nucleotide
  modified_base 34: mod_base = OTHER; note = 2'-O-methyl modified nucleotide
  modified_base 35: mod_base = OTHER; note = 2'-O-methyl modified nucleotide
  modified_base 36: mod_base = OTHER; note = 2'-O-methyl modified nucleotide
  modified_base 37: mod_base = OTHER; note = 2'-O-methyl modified nucleotide
  modified_base 38: mod_base = OTHER; note = 2'-O-methyl modified nucleotide
  modified_base 39: mod_base = OTHER; note = 2'-O-methyl modified nucleotide
  modified_base 40: mod_base = OTHER; note = 2'-O-methyl modified nucleotide
  modified_base 69: mod_base = OTHER; note = 2'-O-methyl modified nucleotide
  modified_base 70: mod_base = OTHER; note = 2'-O-methyl modified nucleotide
  modified_base 71: mod_base = OTHER; note = 2'-O-methyl modified nucleotide
  modified_base 72: mod_base = OTHER; note = 2'-O-methyl modified nucleotide
  modified_base 73: mod_base = OTHER; note = 2'-O-methyl modified nucleotide
  modified_base 74: mod_base = OTHER; note = 2'-O-methyl modified nucleotide
  modified_base 75: mod_base = OTHER; note = 2'-O-methyl modified nucleotide
  modified_base 76: mod_base = OTHER; note = 2'-O-methyl modified nucleotide
  modified_base 77: mod_base = OTHER; note = 2'-O-methyl modified nucleotide
  modified_base 78: mod_base = OTHER; note = 2'-O-methyl modified nucleotide
  modified_base 79: mod_base = OTHER; note = 2'-O-methyl modified nucleotide
  modified_base 80: mod_base = OTHER; note = 2'-O-methyl modified nucleotide
  modified_base 81: mod_base = OTHER; note = 2'-O-methyl modified nucleotide
  modified_base 82: mod_base = OTHER; note = 2'-O-methyl modified nucleotide
  modified_base 83: mod_base = OTHER; note = 2'-O-methyl modified nucleotide
  modified_base 84: mod_base = OTHER; note = 2'-O-methyl modified nucleotide
  modified_base 85: mod_base = OTHER; note = 2'-O-methyl modified nucleotide
  modified_base 86: mod_base = OTHER; note = 2'-O-methyl modified nucleotide
  modified_base 87: mod_base = OTHER; note = 2'-O-methyl modified nucleotide
  modified_base 88: mod_base = OTHER; note = 2'-O-methyl modified nucleotide
  modified_base 89: mod_base = OTHER; note = 2'-O-methyl modified nucleotide
  modified_base 90: mod_base = OTHER; note = 2'-O-methyl modified nucleotide
  modified_base 91: mod_base = OTHER; note = 2'-O-methyl modified nucleotide
  modified_base 92: mod_base = OTHER; note = 2'-O-methyl modified nucleotide
  modified_base 93: mod_base = OTHER; note = 2'-O-methyl modified nucleotide
  modified_base 94: mod_base = OTHER; note = 2'-O-methyl modified nucleotide
  modified_base 95: mod_base = OTHER; note = 2'-O-methyl modified nucleotide
  modified_base 96: mod_base = OTHER; note = 2'-O-methyl modified nucleotide
  modified_base 117: mod_base = OTHER; note = Nucleotide with phosphorothioate linkage
  modified_base 118: mod_base = OTHER; note = 2'-O-methyl modified nucleotide with phosphorothioate linkage
  modified_base 119: mod_base = OTHER; note = 2'-O-methyl modified nucleotide with phosphorothioate linkage
  modified_base 120: mod_base = OTHER; note = 2'-O-methyl modified nucleotide
gagaatcaaaatcggtgaatgttttagagctagaaatagcaagttaaaataaggctagtccgttatcaacttgaaaaagtggcaccgagtcggtgcagtgacaagtctgattcaccgatt

SEQ ID NO: 16325 - RNA, 127 nt, synthetic construct
  source 1..127: mol_type = other RNA
  modified_base 1: mod_base = OTHER; note = 2'-O-methyl modified nucleotide with phosphorothioate linkage
  modified_base 2: mod_base = OTHER; note = 2'-O-methyl modified nucleotide with phosphorothioate linkage
  modified_base 3: mod_base = OTHER; note = 2'-O-methyl modified nucleotide with phosphorothioate linkage
  modified_base 29: mod_base = OTHER; note = 2'-O-methyl modified nucleotide
  modified_base 30: mod_base = OTHER; note = 2'-O-methyl modified nucleotide
  modified_base 31: mod_base = OTHER; note = 2'-O-methyl modified nucleotide
  modified_base 32: mod_base = OTHER; note = 2'-O-methyl modified nucleotide
  modified_base 33: mod_base = OTHER; note = 2'-O-methyl modified nucleotide
  modified_base 34: mod_base = OTHER; note = 2'-O-methyl modified nucleotide
  modified_base 35: mod_base = OTHER; note = 2'-O-methyl modified nucleotide
  modified_base 36: mod_base = OTHER; note = 2'-O-methyl modified nucleotide
  modified_base 37: mod_base = OTHER; note = 2'-O-methyl modified nucleotide
  modified_base 38: mod_base = OTHER; note = 2'-O-methyl modified nucleotide
  modified_base 39: mod_base = OTHER; note = 2'-O-methyl modified nucleotide
  modified_base 40: mod_base = OTHER; note = 2'-O-methyl modified nucleotide
  modified_base 69: mod_base = OTHER; note = 2'-O-methyl modified nucleotide
  modified_base 70: mod_base = OTHER; note = 2'-O-methyl modified nucleotide
  modified_base 71: mod_base = OTHER; note = 2'-O-methyl modified nucleotide
  modified_base 72: mod_base = OTHER; note = 2'-O-methyl modified nucleotide
  modified_base 73: mod_base = OTHER; note = 2'-O-methyl modified nucleotide
  modified_base 74: mod_base = OTHER; note = 2'-O-methyl modified nucleotide
  modified_base 75: mod_base = OTHER; note = 2'-O-methyl modified nucleotide
  modified_base 76: mod_base = OTHER; note = 2'-O-methyl modified nucleotide
  modified_base 77: mod_base = OTHER; note = 2'-O-methyl modified nucleotide
  modified_base 78: mod_base = OTHER; note = 2'-O-methyl modified nucleotide
  modified_base 79: mod_base = OTHER; note = 2'-O-methyl modified nucleotide
  modified_base 80: mod_base = OTHER; note = 2'-O-methyl modified nucleotide
  modified_base 81: mod_base = OTHER; note = 2'-O-methyl modified nucleotide
  modified_base 82: mod_base = OTHER; note = 2'-O-methyl modified nucleotide
  modified_base 83: mod_base = OTHER; note = 2'-O-methyl modified nucleotide
  modified_base 84: mod_base = OTHER; note = 2'-O-methyl modified nucleotide
  modified_base 85: mod_base = OTHER; note = 2'-O-methyl modified nucleotide
  modified_base 86: mod_base = OTHER; note = 2'-O-methyl modified nucleotide
  modified_base 87: mod_base = OTHER; note = 2'-O-methyl modified nucleotide
  modified_base 88: mod_base = OTHER; note = 2'-O-methyl modified nucleotide
  modified_base 89: mod_base = OTHER; note = 2'-O-methyl modified nucleotide
  modified_base 90: mod_base = OTHER; note = 2'-O-methyl modified nucleotide
  modified_base 91: mod_base = OTHER; note = 2'-O-methyl modified nucleotide
  modified_base 92: mod_base = OTHER; note = 2'-O-methyl modified nucleotide
  modified_base 93: mod_base = OTHER; note = 2'-O-methyl modified nucleotide
  modified_base 94: mod_base = OTHER; note = 2'-O-methyl modified nucleotide
  modified_base 95: mod_base = OTHER; note = 2'-O-methyl modified nucleotide
  modified_base 96: mod_base = OTHER; note = 2'-O-methyl modified nucleotide
  modified_base 124: mod_base = OTHER; note = Nucleotide with phosphorothioate linkage
  modified_base 125: mod_base = OTHER; note = 2'-O-methyl modified nucleotide with phosphorothioate linkage
  modified_base 126: mod_base = OTHER; note = 2'-O-methyl modified nucleotide with phosphorothioate linkage
  modified_base 127: mod_base = OTHER; note = 2'-O-methyl modified nucleotide
gagaatcaaaatcggtgaatgttttagagctagaaatagcaagttaaaataaggctagtccgttatcaacttgaaaaagtggcaccgagtcggtgcccagtgacaagtctgattcaccgattttgat

SEQ ID NO: 16326 - RNA, 126 nt, synthetic construct
  source 1..126: mol_type = other RNA
  modified_base 1: mod_base = OTHER; note = 2'-O-methyl modified nucleotide with phosphorothioate linkage
  modified_base 2: mod_base = OTHER; note = 2'-O-methyl modified nucleotide with phosphorothioate linkage
  modified_base 3: mod_base = OTHER; note = 2'-O-methyl modified nucleotide with phosphorothioate linkage
  modified_base 29: mod_base = OTHER; note = 2'-O-methyl modified nucleotide
  modified_base 30: mod_base = OTHER; note = 2'-O-methyl modified nucleotide
  modified_base 31: mod_base = OTHER; note = 2'-O-methyl modified nucleotide
  modified_base 32: mod_base = OTHER; note = 2'-O-methyl modified nucleotide
  modified_base 33: mod_base = OTHER; note = 2'-O-methyl modified nucleotide
  modified_base 34: mod_base = OTHER; note = 2'-O-methyl modified nucleotide
  modified_base 35: mod_base = OTHER; note = 2'-O-methyl modified nucleotide
  modified_base 36: mod_base = OTHER; note = 2'-O-methyl modified nucleotide
  modified_base 37: mod_base = OTHER; note = 2'-O-methyl modified nucleotide
  modified_base 38: mod_base = OTHER; note = 2'-O-methyl modified nucleotide
  modified_base 39: mod_base = OTHER; note = 2'-O-methyl modified nucleotide
  modified_base 40: mod_base = OTHER; note = 2'-O-methyl modified nucleotide
  modified_base 69: mod_base = OTHER; note = 2'-O-methyl modified nucleotide
  modified_base 70: mod_base = OTHER; note = 2'-O-methyl modified nucleotide
  modified_base 71: mod_base = OTHER; note = 2'-O-methyl modified nucleotide
  modified_base 72: mod_base = OTHER; note = 2'-O-methyl modified nucleotide
  modified_base 73: mod_base = OTHER; note = 2'-O-methyl modified nucleotide
  modified_base 74: mod_base = OTHER; note = 2'-O-methyl modified nucleotide
  modified_base 75: mod_base = OTHER; note = 2'-O-methyl modified nucleotide
  modified_base 76: mod_base = OTHER; note = 2'-O-methyl modified nucleotide
  modified_base 77: mod_base = OTHER; note = 2'-O-methyl modified nucleotide
  modified_base 78: mod_base = OTHER; note = 2'-O-methyl modified nucleotide
  modified_base 79: mod_base = OTHER; note = 2'-O-methyl modified nucleotide
  modified_base 80: mod_base = OTHER; note = 2'-O-methyl modified nucleotide
  modified_base 81: mod_base = OTHER; note = 2'-O-methyl modified nucleotide
  modified_base 82: mod_base = OTHER; note = 2'-O-methyl modified nucleotide
  modified_base 83: mod_base = OTHER; note = 2'-O-methyl modified nucleotide
  modified_base 84: mod_base = OTHER; note = 2'-O-methyl modified nucleotide
  modified_base 85: mod_base = OTHER; note = 2'-O-methyl modified nucleotide
  modified_base 86: mod_base = OTHER; note = 2'-O-methyl modified nucleotide
  modified_base 87: mod_base = OTHER; note = 2'-O-methyl modified nucleotide
  modified_base 88: mod_base = OTHER; note = 2'-O-methyl modified nucleotide
  modified_base 89: mod_base = OTHER; note = 2'-O-methyl modified nucleotide
  modified_base 90: mod_base = OTHER; note = 2'-O-methyl modified nucleotide
  modified_base 91: mod_base = OTHER; note = 2'-O-methyl modified nucleotide
  modified_base 92: mod_base = OTHER; note = 2'-O-methyl modified nucleotide
  modified_base 93: mod_base = OTHER; note = 2'-O-methyl modified nucleotide
  modified_base 94: mod_base = OTHER; note = 2'-O-methyl modified nucleotide
  modified_base 95: mod_base = OTHER; note = 2'-O-methyl modified nucleotide
  modified_base 96: mod_base = OTHER; note = 2'-O-methyl modified nucleotide
  modified_base 123: mod_base = OTHER; note = Nucleotide with phosphorothioate linkage
  modified_base 124: mod_base = OTHER; note = 2'-O-methyl modified nucleotide with phosphorothioate linkage
  modified_base 125: mod_base = OTHER; note = 2'-O-methyl modified nucleotide with phosphorothioate linkage
  modified_base 126: mod_base = OTHER; note = 2'-O-methyl modified nucleotide
gagaatcaaaatcggtgaatgttttagagctagaaatagcaagttaaaataaggctagtccgttatcaacttgaaaaagtggcaccgagtcggtgcccagtgacaagtctgattcaccgattttga

SEQ ID NO: 16327 - RNA, 125 nt, synthetic construct
  source 1..125: mol_type = other RNA
  modified_base 1: mod_base = OTHER; note = 2'-O-methyl modified nucleotide with phosphorothioate linkage
  modified_base 2: mod_base = OTHER; note = 2'-O-methyl modified nucleotide with phosphorothioate linkage
  modified_base 3: mod_base = OTHER; note = 2'-O-methyl modified nucleotide with phosphorothioate linkage
  modified_base 29: mod_base = OTHER; note = 2'-O-methyl modified nucleotide
  modified_base 30: mod_base = OTHER; note = 2'-O-methyl modified nucleotide
  modified_base 31: mod_base = OTHER; note = 2'-O-methyl modified nucleotide
  modified_base 32: mod_base = OTHER; note = 2'-O-methyl modified nucleotide
  modified_base 33: mod_base = OTHER; note = 2'-O-methyl modified nucleotide
  modified_base 34: mod_base = OTHER; note = 2'-O-methyl modified nucleotide
  modified_base 35: mod_base = OTHER; note = 2'-O-methyl modified nucleotide
  modified_base 36: mod_base = OTHER; note = 2'-O-methyl modified nucleotide
  modified_base 37: mod_base = OTHER; note = 2'-O-methyl modified nucleotide
  modified_base 38: mod_base = OTHER; note = 2'-O-methyl modified nucleotide
  modified_base 39: mod_base = OTHER; note = 2'-O-methyl modified nucleotide
  modified_base 40: mod_base = OTHER; note = 2'-O-methyl modified nucleotide
  modified_base 69: mod_base = OTHER; note = 2'-O-methyl modified nucleotide
  modified_base 70: mod_base = OTHER; note = 2'-O-methyl modified nucleotide
  modified_base 71: mod_base = OTHER; note = 2'-O-methyl modified nucleotide
  modified_base 72: mod_base = OTHER; note = 2'-O-methyl modified nucleotide
  modified_base 73: mod_base = OTHER; note = 2'-O-methyl modified nucleotide
  modified_base 74: mod_base = OTHER; note = 2'-O-methyl modified nucleotide
  modified_base 75: mod_base = OTHER; note = 2'-O-methyl modified nucleotide
  modified_base 76: mod_base = OTHER; note = 2'-O-methyl modified nucleotide
  modified_base 77: mod_base = OTHER; note = 2'-O-methyl modified nucleotide
  modified_base 78: mod_base = OTHER; note = 2'-O-methyl modified nucleotide
  modified_base 79: mod_base = OTHER; note = 2'-O-methyl modified nucleotide
  modified_base 80: mod_base = OTHER; note = 2'-O-methyl modified nucleotide
  modified_base 81: mod_base = OTHER; note = 2'-O-methyl modified nucleotide
  modified_base 82: mod_base = OTHER; note = 2'-O-methyl modified nucleotide
  modified_base 83: mod_base = OTHER; note = 2'-O-methyl modified nucleotide
  modified_base 84: mod_base = OTHER; note = 2'-O-methyl modified nucleotide
  modified_base 85: mod_base = OTHER; note = 2'-O-methyl modified nucleotide
  modified_base 86: mod_base = OTHER; note = 2'-O-methyl modified nucleotide
  modified_base 87: mod_base = OTHER; note = 2'-O-methyl modified nucleotide
  modified_base 88: mod_base = OTHER; note = 2'-O-methyl modified nucleotide
  modified_base 89: mod_base = OTHER; note = 2'-O-methyl modified nucleotide
  modified_base 90: mod_base = OTHER; note = 2'-O-methyl modified nucleotide
  modified_base 91: mod_base = OTHER; note = 2'-O-methyl modified nucleotide
  modified_base 92: mod_base = OTHER; note = 2'-O-methyl modified nucleotide
  modified_base 93: mod_base = OTHER; note = 2'-O-methyl modified nucleotide
  modified_base 94: mod_base = OTHER; note = 2'-O-methyl modified nucleotide
  modified_base 95: mod_base = OTHER; note = 2'-O-methyl modified nucleotide
  modified_base 96: mod_base = OTHER; note = 2'-O-methyl modified nucleotide
  modified_base 122: mod_base = OTHER; note = Nucleotide with phosphorothioate linkage
  modified_base 123: mod_base = OTHER; note = 2'-O-methyl modified nucleotide with phosphorothioate linkage
  modified_base 124: mod_base = OTHER; note = 2'-O-methyl modified nucleotide with phosphorothioate linkage
  modified_base 125: mod_base = OTHER; note = 2'-O-methyl modified nucleotide
gagaatcaaaatcggtgaatgttttagagctagaaatagcaagttaaaataaggctagtccgttatcaacttgaaaaagtggcaccgagtcggtgcccagtgacaagtctgattcaccgattttg

SEQ ID NO: 16328 - RNA, 124 nt, synthetic construct
  source 1..124: mol_type = other RNA
  modified_base 1: mod_base = OTHER; note = 2'-O-methyl modified nucleotide with phosphorothioate linkage
  modified_base 2: mod_base = OTHER; note = 2'-O-methyl modified nucleotide with phosphorothioate linkage
  modified_base 3: mod_base = OTHER; note = 2'-O-methyl modified nucleotide with phosphorothioate linkage
  modified_base 29: mod_base = OTHER; note = 2'-O-methyl modified nucleotide
  modified_base 30: mod_base = OTHER; note = 2'-O-methyl modified nucleotide
  modified_base 31: mod_base = OTHER; note = 2'-O-methyl modified nucleotide
  modified_base 32: mod_base = OTHER; note = 2'-O-methyl modified nucleotide
  modified_base 33: mod_base = OTHER; note = 2'-O-methyl modified nucleotide
  modified_base 34: mod_base = OTHER; note = 2'-O-methyl modified nucleotide
  modified_base 35: mod_base = OTHER; note = 2'-O-methyl modified nucleotide
  modified_base 36: mod_base = OTHER; note = 2'-O-methyl modified nucleotide
  modified_base 37: mod_base = OTHER; note = 2'-O-methyl modified nucleotide
  modified_base 38: mod_base = OTHER; note = 2'-O-methyl modified nucleotide
  modified_base 39: mod_base = OTHER; note = 2'-O-methyl modified nucleotide
  modified_base 40: mod_base = OTHER; note = 2'-O-methyl modified nucleotide
  modified_base 69: mod_base = OTHER; note = 2'-O-methyl modified nucleotide
  modified_base 70: mod_base = OTHER; note = 2'-O-methyl modified nucleotide
  modified_base 71: mod_base = OTHER; note = 2'-O-methyl modified nucleotide
  modified_base 72: mod_base = OTHER; note = 2'-O-methyl modified nucleotide
  modified_base 73: mod_base = OTHER; note = 2'-O-methyl modified nucleotide
  modified_base 74: mod_base = OTHER; note = 2'-O-methyl modified nucleotide
  modified_base 75: mod_base = OTHER; note = 2'-O-methyl modified nucleotide
  modified_base 76: mod_base = OTHER; note = 2'-O-methyl modified nucleotide
  modified_base 77: mod_base = OTHER; note = 2'-O-methyl modified nucleotide
  modified_base 78: mod_base = OTHER; note = 2'-O-methyl modified nucleotide
  modified_base 79: mod_base = OTHER; note = 2'-O-methyl modified nucleotide
  modified_base 80: mod_base = OTHER; note = 2'-O-methyl modified nucleotide
  modified_base 81: mod_base = OTHER; note = 2'-O-methyl modified nucleotide
  modified_base 82: mod_base = OTHER; note = 2'-O-methyl modified nucleotide
  modified_base 83: mod_base = OTHER; note = 2'-O-methyl modified nucleotide
  modified_base 84: mod_base = OTHER; note = 2'-O-methyl modified nucleotide
  modified_base 85: mod_base = OTHER; note = 2'-O-methyl modified nucleotide
  modified_base 86: mod_base = OTHER; note = 2'-O-methyl modified nucleotide
  modified_base 87: mod_base = OTHER; note = 2'-O-methyl modified nucleotide
  modified_base 88: mod_base = OTHER; note = 2'-O-methyl modified nucleotide
  modified_base 89: mod_base = OTHER; note = 2'-O-methyl modified nucleotide
  modified_base 90: mod_base = OTHER; note = 2'-O-methyl modified nucleotide
  modified_base 91: mod_base = OTHER; note = 2'-O-methyl modified nucleotide
  modified_base 92: mod_base = OTHER; note = 2'-O-methyl modified nucleotide
  modified_base 93: mod_base = OTHER; note = 2'-O-methyl modified nucleotide
  modified_base 94: mod_base = OTHER; note = 2'-O-methyl modified nucleotide
  modified_base 95: mod_base = OTHER; note = 2'-O-methyl modified nucleotide
  modified_base 96: mod_base = OTHER; note = 2'-O-methyl modified nucleotide
  modified_base 121: mod_base = OTHER; note = Nucleotide with phosphorothioate linkage
  modified_base 122: mod_base = OTHER; note = 2'-O-methyl modified nucleotide with phosphorothioate linkage
  modified_base 123: mod_base = OTHER; note = 2'-O-methyl modified nucleotide with phosphorothioate linkage
  modified_base 124: mod_base = OTHER; note = 2'-O-methyl modified nucleotide
gagaatcaaaatcggtgaatgttttagagctagaaatagcaagttaaaataaggctagtccgttatcaacttgaaaaagtggcaccgagtcggtgcccagtgacaagtctgattcaccgatttt

SEQ ID NO: 16329 - RNA, 123 nt, synthetic construct
  source 1..123: mol_type = other RNA
  modified_base 1: mod_base = OTHER; note = 2'-O-methyl modified nucleotide with phosphorothioate linkage
  modified_base 2: mod_base = OTHER; note = 2'-O-methyl modified nucleotide with phosphorothioate linkage
  modified_base 3: mod_base = OTHER; note = 2'-O-methyl modified nucleotide with phosphorothioate linkage
  modified_base 29: mod_base = OTHER; note = 2'-O-methyl modified nucleotide
  modified_base 30: mod_base = OTHER; note = 2'-O-methyl modified nucleotide
  modified_base 31: mod_base = OTHER; note = 2'-O-methyl modified nucleotide
  modified_base 32: mod_base = OTHER; note = 2'-O-methyl modified nucleotide
  modified_base 33: mod_base = OTHER; note = 2'-O-methyl modified nucleotide
  modified_base 34: mod_base = OTHER; note = 2'-O-methyl modified nucleotide
  modified_base 35: mod_base = OTHER; note = 2'-O-methyl modified nucleotide
  modified_base 36: mod_base = OTHER; note = 2'-O-methyl modified nucleotide
  modified_base 37: mod_base = OTHER; note = 2'-O-methyl modified nucleotide
  modified_base 38: mod_base = OTHER; note = 2'-O-methyl modified nucleotide
  modified_base 39: mod_base = OTHER; note = 2'-O-methyl modified nucleotide
  modified_base 40: mod_base = OTHER; note = 2'-O-methyl modified nucleotide
  modified_base 69: mod_base = OTHER; note = 2'-O-methyl modified nucleotide
  modified_base 70: mod_base = OTHER; note = 2'-O-methyl modified nucleotide
  modified_base 71: mod_base = OTHER; note = 2'-O-methyl modified nucleotide
  modified_base 72: mod_base = OTHER; note = 2'-O-methyl modified nucleotide
  modified_base 73: mod_base = OTHER; note = 2'-O-methyl modified nucleotide
  modified_base 74: mod_base = OTHER; note = 2'-O-methyl modified nucleotide
  modified_base 75: mod_base = OTHER; note = 2'-O-methyl modified nucleotide
  modified_base 76: mod_base = OTHER; note = 2'-O-methyl modified nucleotide
  modified_base 77: mod_base = OTHER; note = 2'-O-methyl modified nucleotide
  modified_base 78: mod_base = OTHER; note = 2'-O-methyl modified nucleotide
  modified_base 79: mod_base = OTHER; note = 2'-O-methyl modified nucleotide
  modified_base 80: mod_base = OTHER; note = 2'-O-methyl modified nucleotide
  modified_base 81: mod_base = OTHER; note = 2'-O-methyl modified nucleotide
  modified_base 82: mod_base = OTHER; note = 2'-O-methyl modified nucleotide
  modified_base 83: mod_base = OTHER; note = 2'-O-methyl modified nucleotide
  modified_base 84: mod_base = OTHER; note = 2'-O-methyl modified nucleotide
  modified_base 85: mod_base = OTHER; note = 2'-O-methyl modified nucleotide
  modified_base 86: mod_base = OTHER; note = 2'-O-methyl modified nucleotide
  modified_base 87: mod_base = OTHER; note = 2'-O-methyl modified nucleotide
  modified_base 88: mod_base = OTHER; note = 2'-O-methyl modified nucleotide
  modified_base 89: mod_base = OTHER; note = 2'-O-methyl modified nucleotide
  modified_base 90: mod_base = OTHER; note = 2'-O-methyl modified nucleotide
  modified_base 91: mod_base = OTHER; note = 2'-O-methyl modified nucleotide
  modified_base 92: mod_base = OTHER; note = 2'-O-methyl modified nucleotide
  modified_base 93: mod_base = OTHER; note = 2'-O-methyl modified nucleotide
  modified_base 94: mod_base = OTHER; note = 2'-O-methyl modified nucleotide
  modified_base 95: mod_base = OTHER; note = 2'-O-methyl modified nucleotide
  modified_base 96: mod_base = OTHER; note = 2'-O-methyl modified nucleotide
  modified_base 120: mod_base = OTHER; note = Nucleotide with phosphorothioate linkage
  modified_base 121: mod_base = OTHER; note = 2'-O-methyl modified nucleotide with phosphorothioate linkage
  modified_base 122: mod_base = OTHER; note = 2'-O-methyl modified nucleotide with phosphorothioate linkage
  modified_base 123: mod_base = OTHER; note = 2'-O-methyl modified nucleotide
gagaatcaaaatcggtgaatgttttagagctagaaatagcaagttaaaataaggctagtccgttatcaacttgaaaaagtggcaccgagtcggtgcccagtgacaagtctgattcaccgattt

SEQ ID NO: 16330 - RNA, 122 nt, synthetic construct
  source 1..122: mol_type = other RNA
  modified_base 1: mod_base = OTHER; note = 2'-O-methyl modified nucleotide with phosphorothioate linkage
  modified_base 2: mod_base = OTHER; note = 2'-O-methyl modified nucleotide with phosphorothioate linkage
  modified_base 3: mod_base = OTHER; note = 2'-O-methyl modified nucleotide with phosphorothioate linkage
  modified_base 29: mod_base = OTHER; note = 2'-O-methyl modified nucleotide
  modified_base 30: mod_base = OTHER; note = 2'-O-methyl modified nucleotide
  modified_base 31: mod_base = OTHER; note = 2'-O-methyl modified nucleotide
  modified_base 32: mod_base = OTHER; note = 2'-O-methyl modified nucleotide
  modified_base 33: mod_base = OTHER; note = 2'-O-methyl modified nucleotide
  modified_base 34: mod_base = OTHER; note = 2'-O-methyl modified nucleotide
  modified_base 35: mod_base = OTHER; note = 2'-O-methyl modified nucleotide
  modified_base 36: mod_base = OTHER; note = 2'-O-methyl modified nucleotide
  modified_base 37: mod_base = OTHER; note = 2'-O-methyl modified nucleotide
  modified_base 38: mod_base = OTHER; note = 2'-O-methyl modified nucleotide
  modified_base 39: mod_base = OTHER; note = 2'-O-methyl modified nucleotide
  modified_base 40: mod_base = OTHER; note = 2'-O-methyl modified nucleotide
  modified_base 69: mod_base = OTHER; note = 2'-O-methyl modified nucleotide
  modified_base 70: mod_base = OTHER; note = 2'-O-methyl modified nucleotide
  modified_base 71: mod_base = OTHER; note = 2'-O-methyl modified nucleotide
  modified_base 72: mod_base = OTHER; note = 2'-O-methyl modified nucleotide
  modified_base 73: mod_base = OTHER; note = 2'-O-methyl modified nucleotide
  modified_base 74: mod_base = OTHER; note = 2'-O-methyl modified nucleotide
  modified_base 75: mod_base = OTHER; note = 2'-O-methyl modified nucleotide
  modified_base 76: mod_base = OTHER; note = 2'-O-methyl modified nucleotide
  modified_base 77: mod_base = OTHER; note = 2'-O-methyl modified nucleotide
  modified_base 78: mod_base = OTHER; note = 2'-O-methyl modified nucleotide
  modified_base 79: mod_base = OTHER; note = 2'-O-methyl modified nucleotide
  modified_base 80: mod_base = OTHER; note = 2'-O-methyl modified nucleotide
  modified_base 81: mod_base = OTHER; note = 2'-O-methyl modified nucleotide
  modified_base 82: mod_base = OTHER; note = 2'-O-methyl modified nucleotide
  modified_base 83: mod_base = OTHER; note = 2'-O-methyl modified nucleotide
  modified_base 84: mod_base = OTHER; note = 2'-O-methyl modified nucleotide
  modified_base 85: mod_base = OTHER; note = 2'-O-methyl modified nucleotide
  modified_base 86: mod_base = OTHER; note = 2'-O-methyl modified nucleotide
  modified_base 87: mod_base = OTHER; note = 2'-O-methyl modified nucleotide
  modified_base 88: mod_base = OTHER; note = 2'-O-methyl modified nucleotide
  modified_base 89: mod_base = OTHER; note = 2'-O-methyl modified nucleotide
  modified_base 90: mod_base = OTHER; note = 2'-O-methyl modified nucleotide
  modified_base 91: mod_base = OTHER; note = 2'-O-methyl modified nucleotide
  modified_base 92: mod_base = OTHER; note = 2'-O-methyl modified nucleotide
  modified_base 93: mod_base = OTHER; note = 2'-O-methyl modified nucleotide
  modified_base 94: mod_base = OTHER; note = 2'-O-methyl modified nucleotide
  modified_base 95: mod_base = OTHER; note = 2'-O-methyl modified nucleotide
  modified_base 96: mod_base = OTHER; note = 2'-O-methyl modified nucleotide
  modified_base 119: mod_base = OTHER; note = Nucleotide with phosphorothioate linkage
  modified_base 120: mod_base = OTHER; note = 2'-O-methyl modified nucleotide with phosphorothioate linkage
  modified_base 121: mod_base = OTHER; note = 2'-O-methyl modified nucleotide with phosphorothioate linkage
  modified_base 122: mod_base = OTHER; note = 2'-O-methyl modified nucleotide
gagaatcaaaatcggtgaatgttttagagctagaaatagcaagttaaaataaggctagtccgttatcaacttgaaaaagtggcaccgagtcggtgcccagtgacaagtctgattcaccgatt

SEQ ID NO: 16331 - RNA, 129 nt, synthetic construct
  source 1..129: mol_type = other RNA
  modified_base 1: mod_base = OTHER; note = 2'-O-methyl modified nucleotide with phosphorothioate linkage
  modified_base 2: mod_base = OTHER; note = 2'-O-methyl modified nucleotide with phosphorothioate linkage
  modified_base 3: mod_base = OTHER; note = 2'-O-methyl modified nucleotide with phosphorothioate linkage
  modified_base 29: mod_base = OTHER; note = 2'-O-methyl modified nucleotide
  modified_base 30: mod_base = OTHER; note = 2'-O-methyl modified nucleotide
  modified_base 31: mod_base = OTHER; note = 2'-O-methyl modified nucleotide
  modified_base 32: mod_base = OTHER; note = 2'-O-methyl modified nucleotide
  modified_base 33: mod_base = OTHER; note = 2'-O-methyl modified nucleotide
  modified_base 34: mod_base = OTHER; note = 2'-O-methyl modified nucleotide
  modified_base 35: mod_base = OTHER; note = 2'-O-methyl modified nucleotide
  modified_base 36: mod_base = OTHER; note = 2'-O-methyl modified nucleotide
  modified_base 37: mod_base = OTHER; note = 2'-O-methyl modified nucleotide
  modified_base 38: mod_base = OTHER; note = 2'-O-methyl modified nucleotide
  modified_base 39: mod_base = OTHER; note = 2'-O-methyl modified nucleotide
  modified_base 40: mod_base = OTHER; note = 2'-O-methyl modified nucleotide
  modified_base 69: mod_base = OTHER; note = 2'-O-methyl modified nucleotide
  modified_base 70: mod_base = OTHER; note = 2'-O-methyl modified nucleotide
  modified_base 71: mod_base = OTHER; note = 2'-O-methyl modified nucleotide
  modified_base 72: mod_base = OTHER; note = 2'-O-methyl modified nucleotide
  modified_base 73: mod_base = OTHER; note = 2'-O-methyl modified nucleotide
  modified_base 74: mod_base = OTHER; note = 2'-O-methyl modified nucleotide
  modified_base 75: mod_base = OTHER; note = 2'-O-methyl modified nucleotide
  modified_base 76: mod_base = OTHER; note = 2'-O-methyl modified nucleotide
  modified_base 77: mod_base = OTHER; note = 2'-O-methyl modified nucleotide
  modified_base 78: mod_base = OTHER; note = 2'-O-methyl modified nucleotide
  modified_base 79: mod_base = OTHER; note = 2'-O-methyl modified nucleotide
  modified_base 80: mod_base = OTHER; note = 2'-O-methyl modified nucleotide
  modified_base 81: mod_base = OTHER; note = 2'-O-methyl modified nucleotide
  modified_base 82: mod_base = OTHER; note = 2'-O-methyl modified nucleotide
  modified_base 83: mod_base = OTHER; note = 2'-O-methyl modified nucleotide
  modified_base 84: mod_base = OTHER; note = 2'-O-methyl modified nucleotide
  modified_base 85: mod_base = OTHER; note = 2'-O-methyl modified nucleotide
  modified_base 86: mod_base = OTHER; note = 2'-O-methyl modified nucleotide
  modified_base 87: mod_base = OTHER; note = 2'-O-methyl modified nucleotide
  modified_base 88: mod_base = OTHER; note = 2'-O-methyl modified nucleotide
  modified_base 89: mod_base = OTHER; note = 2'-O-methyl modified nucleotide
  modified_base 90: mod_base = OTHER; note = 2'-O-methyl modified nucleotide
  modified_base 91: mod_base = OTHER; note = 2'-O-methyl modified nucleotide
  modified_base 92: mod_base = OTHER; note = 2'-O-methyl modified nucleotide
  modified_base 93: mod_base = OTHER; note = 2'-O-methyl modified nucleotide
  modified_base 94: mod_base = OTHER; note = 2'-O-methyl modified nucleotide
  modified_base 95: mod_base = OTHER; note = 2'-O-methyl modified nucleotide
  modified_base 96: mod_base = OTHER; note = 2'-O-methyl modified nucleotide
  modified_base 126: mod_base = OTHER; note = Nucleotide with phosphorothioate linkage
  modified_base 127: mod_base = OTHER; note = 2'-O-methyl modified nucleotide with phosphorothioate linkage
  modified_base 128: mod_base = OTHER; note = 2'-O-methyl modified nucleotide with phosphorothioate linkage
  modified_base 129: mod_base = OTHER; note = 2'-O-methyl modified nucleotide
gagaatcaaaatcggtgaatgttttagagctagaaatagcaagttaaaataaggctagtccgttatcaacttgaaaaagtggcaccgagtcggtgcatccagtgacaagtctgattcaccgattttgat

SEQ ID NO: 16332 - RNA, 128 nt, synthetic construct
  source 1..128: mol_type = other RNA
  modified_base 1: mod_base = OTHER; note = 2'-O-methyl modified nucleotide with phosphorothioate linkage
  modified_base 2: mod_base = OTHER; note = 2'-O-methyl modified nucleotide with phosphorothioate linkage
  modified_base 3: mod_base = OTHER; note = 2'-O-methyl modified nucleotide with phosphorothioate linkage
  modified_base 29: mod_base = OTHER; note = 2'-O-methyl modified nucleotide
  modified_base 30: mod_base = OTHER; note = 2'-O-methyl modified nucleotide
  modified_base 31: mod_base = OTHER; note = 2'-O-methyl modified nucleotide
  modified_base 32: mod_base = OTHER; note = 2'-O-methyl modified nucleotide
  modified_base 33: mod_base = OTHER; note = 2'-O-methyl modified nucleotide
  modified_base 34: mod_base = OTHER; note = 2'-O-methyl modified nucleotide
  modified_base 35: mod_base = OTHER; note = 2'-O-methyl modified nucleotide
  modified_base 36: mod_base = OTHER; note = 2'-O-methyl modified nucleotide
  modified_base 37: mod_base = OTHER; note = 2'-O-methyl modified nucleotide
  modified_base 38: mod_base = OTHER; note = 2'-O-methyl modified nucleotide
  modified_base 39: mod_base = OTHER; note = 2'-O-methyl modified nucleotide
  modified_base 40: mod_base = OTHER; note = 2'-O-methyl modified nucleotide
  modified_base 69: mod_base = OTHER; note = 2'-O-methyl modified nucleotide
  modified_base 70: mod_base = OTHER; note = 2'-O-methyl modified nucleotide
  modified_base 71: mod_base = OTHER; note = 2'-O-methyl modified nucleotide
  modified_base 72: mod_base = OTHER; note = 2'-O-methyl modified nucleotide
  modified_base 73: mod_base = OTHER; note = 2'-O-methyl modified nucleotide
  modified_base 74: mod_base = OTHER; note = 2'-O-methyl modified nucleotide
  modified_base 75: mod_base = OTHER; note = 2'-O-methyl modified nucleotide
  modified_base 76: mod_base = OTHER; note = 2'-O-methyl modified nucleotide
  modified_base 77: mod_base = OTHER; note = 2'-O-methyl modified nucleotide
  modified_base 78: mod_base = OTHER; note = 2'-O-methyl modified nucleotide
  modified_base 79: mod_base = OTHER; note = 2'-O-methyl modified nucleotide
  modified_base 80: mod_base = OTHER; note = 2'-O-methyl modified nucleotide
  modified_base 81: mod_base = OTHER; note = 2'-O-methyl modified nucleotide
  modified_base 82: mod_base = OTHER; note = 2'-O-methyl modified nucleotide
  modified_base 83: mod_base = OTHER; note = 2'-O-methyl modified nucleotide
  modified_base 84: mod_base = OTHER; note = 2'-O-methyl modified nucleotide
  modified_base 85: mod_base = OTHER; note = 2'-O-methyl modified nucleotide
  modified_base 86: mod_base = OTHER; note = 2'-O-methyl modified nucleotide
  modified_base 87: mod_base = OTHER; note = 2'-O-methyl modified nucleotide
  modified_base 88: mod_base = OTHER; note = 2'-O-methyl modified nucleotide
  modified_base 89: mod_base = OTHER; note = 2'-O-methyl modified nucleotide
  modified_base 90: mod_base = OTHER; note = 2'-O-methyl modified nucleotide
  modified_base 91: mod_base = OTHER; note = 2'-O-methyl modified nucleotide
  modified_base 92: mod_base = OTHER; note = 2'-O-methyl modified nucleotide
  modified_base 93: mod_base = OTHER; note = 2'-O-methyl modified nucleotide
  modified_base 94: mod_base = OTHER; note = 2'-O-methyl modified nucleotide
  modified_base 95: mod_base = OTHER; note = 2'-O-methyl modified nucleotide
  modified_base 96: mod_base = OTHER; note = 2'-O-methyl modified nucleotide
  modified_base 125: mod_base = OTHER; note = Nucleotide with phosphorothioate linkage
  modified_base 126: mod_base = OTHER; note = 2'-O-methyl modified nucleotide with phosphorothioate linkage
  modified_base 127: mod_base = OTHER; note = 2'-O-methyl modified nucleotide with phosphorothioate linkage
  modified_base 128: mod_base = OTHER; note = 2'-O-methyl modified nucleotide
gagaatcaaaatcggtgaatgttttagagctagaaatagcaagttaaaataaggctagtccgttatcaacttgaaaaagtggcaccgagtcggtgcatccagtgacaagtctgattcaccgattttga

SEQ ID NO: 16333 - RNA, 127 nt, synthetic construct
  source 1..127: mol_type = other RNA
  modified_base 1: mod_base = OTHER; note = 2'-O-methyl modified nucleotide with phosphorothioate linkage
  modified_base 2: mod_base = OTHER; note = 2'-O-methyl modified nucleotide with phosphorothioate linkage
  modified_base 3: mod_base = OTHER; note = 2'-O-methyl modified nucleotide with phosphorothioate linkage
  modified_base 29: mod_base = OTHER; note = 2'-O-methyl modified nucleotide
  modified_base 30: mod_base = OTHER; note = 2'-O-methyl modified nucleotide
  modified_base 31: mod_base = OTHER; note = 2'-O-methyl modified nucleotide
  modified_base 32: mod_base = OTHER; note = 2'-O-methyl modified nucleotide
  modified_base 33: mod_base = OTHER; note = 2'-O-methyl modified nucleotide
  modified_base 34: mod_base = OTHER; note = 2'-O-methyl modified nucleotide
  modified_base 35: mod_base = OTHER; note = 2'-O-methyl modified nucleotide
  modified_base 36: mod_base = OTHER; note = 2'-O-methyl modified nucleotide
  modified_base 37: mod_base = OTHER; note = 2'-O-methyl modified nucleotide
  modified_base 38: mod_base = OTHER; note = 2'-O-methyl modified nucleotide
  modified_base 39: mod_base = OTHER; note = 2'-O-methyl modified nucleotide
  modified_base 40: mod_base = OTHER; note = 2'-O-methyl modified nucleotide
  modified_base 69: mod_base = OTHER; note = 2'-O-methyl modified nucleotide
  modified_base 70: mod_base = OTHER; note = 2'-O-methyl modified nucleotide
  modified_base 71: mod_base = OTHER; note = 2'-O-methyl modified nucleotide
  modified_base 72: mod_base = OTHER; note = 2'-O-methyl modified nucleotide
  modified_base 73: mod_base = OTHER; note = 2'-O-methyl modified nucleotide
  modified_base 74: mod_base = OTHER; note = 2'-O-methyl modified nucleotide
  modified_base 75: mod_base = OTHER; note = 2'-O-methyl modified nucleotide
  modified_base 76: mod_base = OTHER; note = 2'-O-methyl modified nucleotide
  modified_base 77: mod_base = OTHER; note = 2'-O-methyl modified nucleotide
  modified_base 78: mod_base = OTHER; note = 2'-O-methyl modified nucleotide
  modified_base 79: mod_base = OTHER; note = 2'-O-methyl modified nucleotide
  modified_base 80: mod_base = OTHER; note = 2'-O-methyl modified nucleotide
  modified_base 81: mod_base = OTHER; note = 2'-O-methyl modified nucleotide
  modified_base 82: mod_base = OTHER; note = 2'-O-methyl modified nucleotide
  modified_base 83: mod_base = OTHER; note = 2'-O-methyl modified nucleotide
  modified_base 84: mod_base = OTHER; note = 2'-O-methyl modified nucleotide
  modified_base 85: mod_base = OTHER; note = 2'-O-methyl modified nucleotide
  modified_base 86: mod_base = OTHER; note = 2'-O-methyl modified nucleotide
  modified_base 87: mod_base = OTHER; note = 2'-O-methyl modified nucleotide
  modified_base 88: mod_base = OTHER; note = 2'-O-methyl modified nucleotide
  modified_base 89: mod_base = OTHER; note = 2'-O-methyl modified nucleotide
  modified_base 90: mod_base = OTHER; note = 2'-O-methyl modified nucleotide
  modified_base 91: mod_base = OTHER; note = 2'-O-methyl modified nucleotide
  modified_base 92: mod_base = OTHER; note = 2'-O-methyl modified nucleotide
  modified_base 93: mod_base = OTHER; note = 2'-O-methyl modified nucleotide
  modified_base 94: mod_base = OTHER; note = 2'-O-methyl modified nucleotide
  modified_base 95: mod_base = OTHER; note = 2'-O-methyl modified nucleotide
  modified_base 96: mod_base = OTHER; note = 2'-O-methyl modified nucleotide
  modified_base 124: mod_base = OTHER; note = Nucleotide with phosphorothioate linkage
  modified_base 125: mod_base = OTHER; note = 2'-O-methyl modified nucleotide with phosphorothioate linkage
  modified_base 126: mod_base = OTHER; note = 2'-O-methyl modified nucleotide with phosphorothioate linkage
  modified_base 127: mod_base = OTHER; note = 2'-O-methyl modified nucleotide
gagaatcaaaatcggtgaatgttttagagctagaaatagcaagttaaaataaggctagtccgttatcaacttgaaaaagtggcaccgagtcggtgcatccagtgacaagtctgattcaccgattttg

SEQ ID NO: 16334 - RNA, 126 nt, synthetic construct
  source 1..126: mol_type = other RNA
  modified_base 1: mod_base = OTHER; note = 2'-O-methyl modified nucleotide with phosphorothioate linkage
  modified_base 2: mod_base = OTHER; note = 2'-O-methyl modified nucleotide with phosphorothioate linkage
  modified_base 3: mod_base = OTHER; note = 2'-O-methyl modified nucleotide with phosphorothioate linkage
  modified_base 29: mod_base = OTHER; note = 2'-O-methyl modified nucleotide
  modified_base 30: mod_base = OTHER; note = 2'-O-methyl modified nucleotide
  modified_base 31: mod_base = OTHER; note = 2'-O-methyl modified nucleotide
  modified_base 32: mod_base = OTHER; note = 2'-O-methyl modified nucleotide
  modified_base 33: mod_base = OTHER; note = 2'-O-methyl modified nucleotide
  modified_base 34: mod_base = OTHER; note = 2'-O-methyl modified nucleotide
  modified_base 35: mod_base = OTHER; note = 2'-O-methyl modified nucleotide
  modified_base 36: mod_base = OTHER; note = 2'-O-methyl modified nucleotide
  modified_base 37: mod_base = OTHER; note = 2'-O-methyl modified nucleotide
  modified_base 38: mod_base = OTHER; note = 2'-O-methyl modified nucleotide
  modified_base 39: mod_base = OTHER; note = 2'-O-methyl modified nucleotide
  modified_base 40: mod_base = OTHER; note = 2'-O-methyl modified nucleotide
  modified_base 69: mod_base = OTHER; note = 2'-O-methyl modified nucleotide
  modified_base 70: mod_base = OTHER; note = 2'-O-methyl modified nucleotide
  modified_base 71: mod_base = OTHER; note = 2'-O-methyl modified nucleotide
  modified_base 72: mod_base = OTHER; note = 2'-O-methyl modified nucleotide
  modified_base 73: mod_base = OTHER; note = 2'-O-methyl modified nucleotide
  modified_base 74: mod_base = OTHER; note = 2'-O-methyl modified nucleotide
  modified_base 75: mod_base = OTHER; note = 2'-O-methyl modified nucleotide
  modified_base 76: mod_base = OTHER; note = 2'-O-methyl modified nucleotide
  modified_base 77: mod_base = OTHER; note = 2'-O-methyl modified nucleotide
  modified_base 78: mod_base = OTHER; note = 2'-O-methyl modified nucleotide
  modified_base 79: mod_base = OTHER; note = 2'-O-methyl modified nucleotide
  modified_base 80: mod_base = OTHER; note = 2'-O-methyl modified nucleotide
  modified_base 81: mod_base = OTHER; note = 2'-O-methyl modified nucleotide
  modified_base 82: mod_base = OTHER; note = 2'-O-methyl modified nucleotide
  modified_base 83: mod_base = OTHER; note = 2'-O-methyl modified nucleotide
  modified_base 84: mod_base = OTHER; note = 2'-O-methyl modified nucleotide
  modified_base 85: mod_base = OTHER; note = 2'-O-methyl modified nucleotide
  modified_base 86: mod_base = OTHER; note = 2'-O-methyl modified nucleotide
  modified_base 87: mod_base = OTHER; note = 2'-O-methyl modified nucleotide
  modified_base 88: mod_base = OTHER; note = 2'-O-methyl modified nucleotide
  modified_base 89: mod_base = OTHER; note = 2'-O-methyl modified nucleotide
  modified_base 90: mod_base = OTHER; note = 2'-O-methyl modified nucleotide
  modified_base 91: mod_base = OTHER; note = 2'-O-methyl modified nucleotide
  modified_base 92: mod_base = OTHER; note = 2'-O-methyl modified nucleotide
  modified_base 93: mod_base = OTHER; note = 2'-O-methyl modified nucleotide
  modified_base 94: mod_base = OTHER; note = 2'-O-methyl modified nucleotide
  modified_base 95: mod_base = OTHER; note = 2'-O-methyl modified nucleotide
  modified_base 96: mod_base = OTHER; note = 2'-O-methyl modified nucleotide
  modified_base 123: mod_base = OTHER; note = Nucleotide with phosphorothioate linkage
  modified_base 124: mod_base = OTHER; note = 2'-O-methyl modified nucleotide with phosphorothioate linkage
  modified_base 125: mod_base = OTHER; note = 2'-O-methyl modified nucleotide with phosphorothioate linkage
  modified_base 126: mod_base = OTHER; note = 2'-O-methyl modified nucleotide
gagaatcaaaatcggtgaatgttttagagctagaaatagcaagttaaaataaggctagtccgttatcaacttgaaaaagtggcaccgagtcggtgcatccagtgacaagtctgattcaccgatttt

SEQ ID NO: 16335 - RNA, 125 nt, synthetic construct
  source 1..125: mol_type = other RNA
  modified_base 1: mod_base = OTHER; note = 2'-O-methyl modified nucleotide with phosphorothioate linkage
  modified_base 2: mod_base = OTHER; note = 2'-O-methyl modified nucleotide with phosphorothioate linkage
  modified_base 3: mod_base = OTHER; note = 2'-O-methyl modified nucleotide with phosphorothioate linkage
  modified_base 29: mod_base = OTHER; note = 2'-O-methyl modified nucleotide
  modified_base 30: mod_base = OTHER; note = 2'-O-methyl modified nucleotide
  modified_base 31: mod_base = OTHER; note = 2'-O-methyl modified nucleotide
  modified_base 32: mod_base = OTHER; note = 2'-O-methyl modified nucleotide
  modified_base 33: mod_base = OTHER; note = 2'-O-methyl modified nucleotide
  modified_base 34: mod_base = OTHER; note = 2'-O-methyl modified nucleotide
  modified_base 35: mod_base = OTHER; note = 2'-O-methyl modified nucleotide
  modified_base 36: mod_base = OTHER; note = 2'-O-methyl modified nucleotide
  modified_base 37: mod_base = OTHER; note = 2'-O-methyl modified nucleotide
  modified_base 38: mod_base = OTHER; note = 2'-O-methyl modified nucleotide
  modified_base 39: mod_base = OTHER; note = 2'-O-methyl modified nucleotide
  modified_base 40: mod_base = OTHER; note = 2'-O-methyl modified nucleotide
  modified_base 69: mod_base = OTHER; note = 2'-O-methyl modified nucleotide
  modified_base 70: mod_base = OTHER; note = 2'-O-methyl modified nucleotide
  modified_base 71: mod_base = OTHER; note = 2'-O-methyl modified nucleotide
  modified_base 72: mod_base = OTHER; note = 2'-O-methyl modified nucleotide
  modified_base 73: mod_base = OTHER; note = 2'-O-methyl modified nucleotide
  modified_base 74: mod_base = OTHER; note = 2'-O-methyl modified nucleotide
  modified_base 75: mod_base = OTHER; note = 2'-O-methyl modified nucleotide
  modified_base 76: mod_base = OTHER; note = 2'-O-methyl modified nucleotide
  modified_base 77: mod_base = OTHER; note = 2'-O-methyl modified nucleotide
  modified_base 78: mod_base = OTHER; note = 2'-O-methyl modified nucleotide
  modified_base 79: mod_base = OTHER; note = 2'-O-methyl modified nucleotide
  modified_base 80: mod_base = OTHER; note = 2'-O-methyl modified nucleotide
  modified_base 81: mod_base = OTHER; note = 2'-O-methyl modified nucleotide
  modified_base 82: mod_base = OTHER; note = 2'-O-methyl modified nucleotide
  modified_base 83: mod_base = OTHER; note = 2'-O-methyl modified nucleotide
  modified_base 84: mod_base = OTHER; note = 2'-O-methyl modified nucleotide
  modified_base 85: mod_base = OTHER; note = 2'-O-methyl modified nucleotide
  modified_base 86: mod_base = OTHER; note = 2'-O-methyl modified nucleotide
  modified_base 87: mod_base = OTHER; note = 2'-O-methyl modified nucleotide
  modified_base 88: mod_base = OTHER; note = 2'-O-methyl modified nucleotide
  modified_base 89: mod_base = OTHER; note = 2'-O-methyl modified nucleotide
  modified_base 90: mod_base = OTHER; note = 2'-O-methyl modified nucleotide
  modified_base 91: mod_base = OTHER; note = 2'-O-methyl modified nucleotide
  modified_base 92: mod_base = OTHER; note = 2'-O-methyl modified nucleotide
  modified_base 93: mod_base = OTHER; note = 2'-O-methyl modified nucleotide
  modified_base 94: mod_base = OTHER; note = 2'-O-methyl modified nucleotide
  modified_base 95: mod_base = OTHER; note = 2'-O-methyl modified nucleotide
  modified_base 96: mod_base = OTHER; note = 2'-O-methyl modified nucleotide
  modified_base 122: mod_base = OTHER; note = Nucleotide with phosphorothioate linkage
  modified_base 123: mod_base = OTHER; note = 2'-O-methyl modified nucleotide with phosphorothioate linkage
  modified_base 124: mod_base = OTHER; note = 2'-O-methyl modified nucleotide with phosphorothioate linkage
  modified_base 125: mod_base = OTHER; note = 2'-O-methyl modified nucleotide
gagaatcaaaatcggtgaatgttttagagctagaaatagcaagttaaaataaggctagtccgttatcaacttgaaaaagtggcaccgagtcggtgcatccagtgacaagtctgattcaccgattt

SEQ ID NO: 16336 - RNA, 124 nt, synthetic construct
  source 1..124: mol_type = other RNA
  modified_base 1: mod_base = OTHER; note = 2'-O-methyl modified nucleotide with phosphorothioate linkage
  modified_base 2: mod_base = OTHER; note = 2'-O-methyl modified nucleotide with phosphorothioate linkage
  modified_base 3: mod_base = OTHER; note = 2'-O-methyl modified nucleotide with phosphorothioate linkage
  modified_base 29: mod_base = OTHER; note = 2'-O-methyl modified nucleotide
  modified_base 30: mod_base = OTHER; note = 2'-O-methyl modified nucleotide
  modified_base 31: mod_base = OTHER; note = 2'-O-methyl modified nucleotide
  modified_base 32: mod_base = OTHER; note = 2'-O-methyl modified nucleotide
  modified_base 33: mod_base = OTHER; note = 2'-O-methyl modified nucleotide
  modified_base 34: mod_base = OTHER; note = 2'-O-methyl modified nucleotide
  modified_base 35: mod_base = OTHER; note = 2'-O-methyl modified nucleotide
  modified_base 36: mod_base = OTHER; note = 2'-O-methyl modified nucleotide
  modified_base 37: mod_base = OTHER; note = 2'-O-methyl modified nucleotide
  modified_base 38: mod_base = OTHER; note = 2'-O-methyl modified nucleotide
  modified_base 39: mod_base = OTHER; note = 2'-O-methyl modified nucleotide
  modified_base 40: mod_base = OTHER; note = 2'-O-methyl modified nucleotide
  modified_base 69: mod_base = OTHER; note = 2'-O-methyl modified nucleotide
  modified_base 70: mod_base = OTHER; note = 2'-O-methyl modified nucleotide
  modified_base 71: mod_base = OTHER; note = 2'-O-methyl modified nucleotide
  modified_base 72: mod_base = OTHER; note = 2'-O-methyl modified nucleotide
  modified_base 73: mod_base = OTHER; note = 2'-O-methyl modified nucleotide
  modified_base 74: mod_base = OTHER; note = 2'-O-methyl modified nucleotide
  modified_base 75: mod_base = OTHER; note = 2'-O-methyl modified nucleotide
  modified_base 76: mod_base = OTHER; note = 2'-O-methyl modified nucleotide
  modified_base 77: mod_base = OTHER; note = 2'-O-methyl modified nucleotide
  modified_base 78: mod_base = OTHER; note = 2'-O-methyl modified nucleotide
  modified_base 79: mod_base = OTHER; note = 2'-O-methyl modified nucleotide
  modified_base 80: mod_base = OTHER; note = 2'-O-methyl modified nucleotide
  modified_base 81: mod_base = OTHER; note = 2'-O-methyl modified nucleotide
  modified_base 82: mod_base = OTHER; note = 2'-O-methyl modified nucleotide
  modified_base 83: mod_base = OTHER; note = 2'-O-methyl modified nucleotide
  modified_base 84: mod_base = OTHER; note = 2'-O-methyl modified nucleotide
  modified_base 85: mod_base = OTHER; note = 2'-O-methyl modified nucleotide
  modified_base 86: mod_base = OTHER; note = 2'-O-methyl modified nucleotide
  modified_base 87: mod_base = OTHER; note = 2'-O-methyl modified nucleotide
  modified_base 88: mod_base = OTHER; note = 2'-O-methyl modified nucleotide
  modified_base 89: mod_base = OTHER; note = 2'-O-methyl modified nucleotide
  modified_base 90: mod_base = OTHER; note = 2'-O-methyl modified nucleotide
  modified_base 91: mod_base = OTHER; note = 2'-O-methyl modified nucleotide
  modified_base 92: mod_base = OTHER; note = 2'-O-methyl modified nucleotide
  modified_base 93: mod_base = OTHER; note = 2'-O-methyl modified nucleotide
  modified_base 94: mod_base = OTHER; note = 2'-O-methyl modified nucleotide
  modified_base 95: mod_base = OTHER; note = 2'-O-methyl modified nucleotide
  modified_base 96: mod_base = OTHER; note = 2'-O-methyl modified nucleotide
  modified_base 121: mod_base = OTHER; note = Nucleotide with phosphorothioate linkage
  modified_base 122: mod_base = OTHER; note = 2'-O-methyl modified nucleotide with phosphorothioate linkage
  modified_base 123: mod_base = OTHER; note = 2'-O-methyl modified nucleotide with phosphorothioate linkage
  modified_base 124: mod_base = OTHER; note = 2'-O-methyl modified nucleotide
gagaatcaaaatcggtgaatgttttagagctagaaatagcaagttaaaataaggctagtccgttatcaacttgaaaaagtggcaccgagtcggtgcatccagtgacaagtctgattcaccgatt

SEQ ID NO: 16337 - RNA, 119 nt, synthetic construct
  source 1..119: mol_type = other RNA
  modified_base 1: mod_base = OTHER; note = 2'-O-methyl modified nucleotide with phosphorothioate linkage
  modified_base 2: mod_base = OTHER; note = 2'-O-methyl modified nucleotide with phosphorothioate linkage
  modified_base 3: mod_base = OTHER; note = 2'-O-methyl modified nucleotide with phosphorothioate linkage
  modified_base 29: mod_base = OTHER; note = 2'-O-methyl modified nucleotide
  modified_base 30: mod_base = OTHER; note = 2'-O-methyl modified nucleotide
  modified_base 31: mod_base = OTHER; note = 2'-O-methyl modified nucleotide
  modified_base 32: mod_base = OTHER; note = 2'-O-methyl modified nucleotide
  modified_base 33: mod_base = OTHER; note = 2'-O-methyl modified nucleotide
  modified_base 34: mod_base = OTHER; note = 2'-O-methyl modified nucleotide
  modified_base 35: mod_base = OTHER; note = 2'-O-methyl modified nucleotide
  modified_base 36: mod_base = OTHER; note = 2'-O-methyl modified nucleotide
  modified_base 37: mod_base = OTHER; note = 2'-O-methyl modified nucleotide
  modified_base 38: mod_base = OTHER; note = 2'-O-methyl modified nucleotide
  modified_base 39: mod_base = OTHER; note = 2'-O-methyl modified nucleotide
  modified_base 40: mod_base = OTHER; note = 2'-O-methyl modified nucleotide
  modified_base 69: mod_base = OTHER; note = 2'-O-methyl modified nucleotide
  modified_base 70: mod_base = OTHER; note = 2'-O-methyl modified nucleotide
  modified_base 71: mod_base = OTHER; note = 2'-O-methyl modified nucleotide
  modified_base 72: mod_base = OTHER; note = 2'-O-methyl modified nucleotide
  modified_base 73: mod_base = OTHER; note = 2'-O-methyl modified nucleotide
  modified_base 74: mod_base = OTHER; note = 2'-O-methyl modified nucleotide
  modified_base 75: mod_base = OTHER; note = 2'-O-methyl modified nucleotide
  modified_base 76: mod_base = OTHER; note = 2'-O-methyl modified nucleotide
  modified_base 77: mod_base = OTHER; note = 2'-O-methyl modified nucleotide
  modified_base 78: mod_base = OTHER; note = 2'-O-methyl modified nucleotide
  modified_base 79: mod_base = OTHER; note = 2'-O-methyl modified nucleotide
  modified_base 80: mod_base = OTHER; note = 2'-O-methyl modified nucleotide
  modified_base 81: mod_base = OTHER; note = 2'-O-methyl modified nucleotide
  modified_base 82: mod_base = OTHER; note = 2'-O-methyl modified nucleotide
  modified_base 83: mod_base = OTHER; note = 2'-O-methyl modified nucleotide
  modified_base 84: mod_base = OTHER; note = 2'-O-methyl modified nucleotide
  modified_base 85: mod_base = OTHER; note = 2'-O-methyl modified nucleotide
  modified_base 86: mod_base = OTHER; note = 2'-O-methyl modified nucleotide
  modified_base 87: mod_base = OTHER; note = 2'-O-methyl modified nucleotide
  modified_base 88: mod_base = OTHER; note = 2'-O-methyl modified nucleotide
  modified_base 89: mod_base = OTHER; note = 2'-O-methyl modified nucleotide
  modified_base 90: mod_base = OTHER; note = 2'-O-methyl modified nucleotide
  modified_base 91: mod_base = OTHER; note = 2'-O-methyl modified nucleotide
  modified_base 92: mod_base = OTHER; note = 2'-O-methyl modified nucleotide
  modified_base 93: mod_base = OTHER; note = 2'-O-methyl modified nucleotide
  modified_base 94: mod_base = OTHER; note = 2'-O-methyl modified nucleotide
  modified_base 95: mod_base = OTHER; note = 2'-O-methyl modified nucleotide
  modified_base 96: mod_base = OTHER; note = 2'-O-methyl modified nucleotide
  modified_base 116: mod_base = OTHER; note = Nucleotide with phosphorothioate linkage
  modified_base 117: mod_base = OTHER; note = 2'-O-methyl modified nucleotide with phosphorothioate linkage
  modified_base 118: mod_base = OTHER; note = 2'-O-methyl modified nucleotide with phosphorothioate linkage
  modified_base 119: mod_base = OTHER; note = 2'-O-methyl modified nucleotide
gagaatcaaaatcggtgaatgttttagagctagaaatagcaagttaaaataaggctagtccgttatcaacttgaaaaagtggcaccgagtcggtgcctatttgatgcaccgattttgat

SEQ ID NO: 16338 - RNA, 118 nt, synthetic construct
  source 1..118: mol_type = other RNA
  modified_base 1: mod_base = OTHER; note = 2'-O-methyl modified nucleotide with phosphorothioate linkage
  modified_base 2: mod_base = OTHER; note = 2'-O-methyl modified nucleotide with phosphorothioate linkage
  modified_base 3: mod_base = OTHER; note = 2'-O-methyl modified nucleotide with phosphorothioate linkage
  modified_base 29: mod_base = OTHER; note = 2'-O-methyl modified nucleotide
  modified_base 30: mod_base = OTHER; note = 2'-O-methyl modified nucleotide
  modified_base 31: mod_base = OTHER; note = 2'-O-methyl modified nucleotide
  modified_base 32: mod_base = OTHER; note = 2'-O-methyl modified nucleotide
  modified_base 33: mod_base = OTHER; note = 2'-O-methyl modified nucleotide
  modified_base 34: mod_base = OTHER; note = 2'-O-methyl modified nucleotide
  modified_base 35: mod_base = OTHER; note = 2'-O-methyl modified nucleotide
  modified_base 36: mod_base = OTHER; note = 2'-O-methyl modified nucleotide
  modified_base 37: mod_base = OTHER; note = 2'-O-methyl modified nucleotide
  modified_base 38: mod_base = OTHER; note = 2'-O-methyl modified nucleotide
  modified_base 39: mod_base = OTHER; note = 2'-O-methyl modified nucleotide
  modified_base 40: mod_base = OTHER; note = 2'-O-methyl modified nucleotide
  modified_base 69: mod_base = OTHER; note = 2'-O-methyl modified nucleotide
  modified_base 70: mod_base = OTHER; note = 2'-O-methyl modified nucleotide
  modified_base 71: mod_base = OTHER; note = 2'-O-methyl modified nucleotide
  modified_base 72: mod_base = OTHER; note = 2'-O-methyl modified nucleotide
  modified_base 73: mod_base = OTHER; note = 2'-O-methyl modified nucleotide
  modified_base 74: mod_base = OTHER; note = 2'-O-methyl modified nucleotide
  modified_base 75: mod_base = OTHER; note = 2'-O-methyl modified nucleotide
  modified_base 76: mod_base = OTHER; note = 2'-O-methyl modified nucleotide
  modified_base 77: mod_base = OTHER; note = 2'-O-methyl modified nucleotide
  modified_base 78: mod_base = OTHER; note = 2'-O-methyl modified nucleotide
  modified_base 79: mod_base = OTHER; note = 2'-O-methyl modified nucleotide
  modified_base 80: mod_base = OTHER; note = 2'-O-methyl modified nucleotide
  modified_base 81: mod_base = OTHER; note = 2'-O-methyl modified nucleotide
  modified_base 82: mod_base = OTHER; note = 2'-O-methyl modified nucleotide
  modified_base 83: mod_base = OTHER; note = 2'-O-methyl modified nucleotide
  modified_base 84: mod_base = OTHER; note = 2'-O-methyl modified nucleotide
  modified_base 85: mod_base = OTHER; note = 2'-O-methyl modified nucleotide
  modified_base 86: mod_base = OTHER; note = 2'-O-methyl modified nucleotide
  modified_base 87: mod_base = OTHER; note = 2'-O-methyl modified nucleotide
  modified_base 88: mod_base = OTHER; note = 2'-O-methyl modified nucleotide
  modified_base 89: mod_base = OTHER; note = 2'-O-methyl modified nucleotide
  modified_base 90: mod_base = OTHER; note = 2'-O-methyl modified nucleotide
  modified_base 91: mod_base = OTHER; note = 2'-O-methyl modified nucleotide
  modified_base 92: mod_base = OTHER; note = 2'-O-methyl modified nucleotide
  modified_base 93: mod_base = OTHER; note = 2'-O-methyl modified nucleotide
  modified_base 94: mod_base = OTHER; note = 2'-O-methyl modified nucleotide
  modified_base 95: mod_base = OTHER; note = 2'-O-methyl modified nucleotide
  modified_base 96: mod_base = OTHER; note = 2'-O-methyl modified nucleotide
  modified_base 115: mod_base = OTHER; note = Nucleotide with phosphorothioate linkage
  modified_base 116: mod_base = OTHER; note = 2'-O-methyl modified nucleotide with phosphorothioate linkage
  modified_base 117: mod_base = OTHER; note = 2'-O-methyl modified nucleotide with phosphorothioate linkage
  modified_base 118: mod_base = OTHER; note = 2'-O-methyl modified nucleotide
gagaatcaaaatcggtgaatgttttagagctagaaatagcaagttaaaataaggctagtccgttatcaacttgaaaaagtggcaccgagtcggtgcctatttgatgcaccgattttga

SEQ ID NO: 16339 - RNA, 117 nt, synthetic construct
  source 1..117: mol_type = other RNA
  modified_base 1: mod_base = OTHER; note = 2'-O-methyl modified nucleotide with phosphorothioate linkage
  modified_base 2: mod_base = OTHER; note = 2'-O-methyl modified nucleotide with phosphorothioate linkage
  modified_base 3: mod_base = OTHER; note = 2'-O-methyl modified nucleotide with phosphorothioate linkage
  modified_base 29: mod_base = OTHER; note = 2'-O-methyl modified nucleotide
  modified_base 30: mod_base = OTHER; note = 2'-O-methyl modified nucleotide
  modified_base 31: mod_base = OTHER; note = 2'-O-methyl modified nucleotide
  modified_base 32: mod_base = OTHER; note = 2'-O-methyl modified nucleotide
  modified_base 33: mod_base = OTHER; note = 2'-O-methyl modified nucleotide
  modified_base 34: mod_base = OTHER; note = 2'-O-methyl modified nucleotide
  modified_base 35: mod_base = OTHER; note = 2'-O-methyl modified nucleotide
  modified_base 36: mod_base = OTHER; note = 2'-O-methyl modified nucleotide
  modified_base 37: mod_base = OTHER; note = 2'-O-methyl modified nucleotide
  modified_base 38: mod_base = OTHER; note = 2'-O-methyl modified nucleotide
  modified_base 39: mod_base = OTHER; note = 2'-O-methyl modified nucleotide
  modified_base 40: mod_base = OTHER; note = 2'-O-methyl modified nucleotide
  modified_base 69: mod_base = OTHER; note = 2'-O-methyl modified nucleotide
  modified_base 70: mod_base = OTHER; note = 2'-O-methyl modified nucleotide
  modified_base 71: mod_base = OTHER; note = 2'-O-methyl modified nucleotide
  modified_base 72: mod_base = OTHER; note = 2'-O-methyl modified nucleotide
  modified_base 73: mod_base = OTHER; note = 2'-O-methyl modified nucleotide
  modified_base 74: mod_base = OTHER; note = 2'-O-methyl modified nucleotide
  modified_base 75: mod_base = OTHER; note = 2'-O-methyl modified nucleotide
  modified_base 76: mod_base = OTHER; note = 2'-O-methyl modified nucleotide
  modified_base 77: mod_base = OTHER; note = 2'-O-methyl modified nucleotide
  modified_base 78: mod_base = OTHER; note = 2'-O-methyl modified nucleotide
  modified_base 79: mod_base = OTHER; note = 2'-O-methyl modified nucleotide
  modified_base 80: mod_base = OTHER; note = 2'-O-methyl modified nucleotide
  modified_base 81: mod_base = OTHER; note = 2'-O-methyl modified nucleotide
  modified_base 82: mod_base = OTHER; note = 2'-O-methyl modified nucleotide
  modified_base 83: mod_base = OTHER; note = 2'-O-methyl modified nucleotide
  modified_base 84: mod_base = OTHER; note = 2'-O-methyl modified nucleotide
  modified_base 85: mod_base = OTHER; note = 2'-O-methyl modified nucleotide
  modified_base 86: mod_base = OTHER; note = 2'-O-methyl modified nucleotide
  modified_base 87: mod_base = OTHER; note = 2'-O-methyl modified nucleotide
  modified_base 88: mod_base = OTHER; note = 2'-O-methyl modified nucleotide
  modified_base 89: mod_base = OTHER; note = 2'-O-methyl modified nucleotide
  modified_base 90: mod_base = OTHER; note = 2'-O-methyl modified nucleotide
  modified_base 91: mod_base = OTHER; note = 2'-O-methyl modified nucleotide
  modified_base 92: mod_base = OTHER; note = 2'-O-methyl modified nucleotide
  modified_base 93: mod_base = OTHER; note = 2'-O-methyl modified nucleotide
  modified_base 94: mod_base = OTHER; note = 2'-O-methyl modified nucleotide
  modified_base 95: mod_base = OTHER; note = 2'-O-methyl modified nucleotide
  modified_base 96: mod_base = OTHER; note = 2'-O-methyl modified nucleotide
  modified_base 114: mod_base = OTHER; note = Nucleotide with phosphorothioate linkage
  modified_base 115: mod_base = OTHER; note = 2'-O-methyl modified nucleotide with phosphorothioate linkage
  modified_base 116: mod_base = OTHER; note = 2'-O-methyl modified nucleotide with phosphorothioate linkage
  modified_base 117: mod_base = OTHER; note = 2'-O-methyl modified nucleotide
gagaatcaaaatcggtgaatgttttagagctagaaatagcaagttaaaataaggctagtccgttatcaacttgaaaaagtggcaccgagtcggtgcctatttgatgcaccgattttg

SEQ ID NO: 16340 - RNA, 116 nt, synthetic construct
  source 1..116: mol_type = other RNA
  modified_base 1: mod_base = OTHER; note = 2'-O-methyl modified nucleotide with phosphorothioate linkage
  modified_base 2: mod_base = OTHER; note = 2'-O-methyl modified nucleotide with phosphorothioate linkage
  modified_base 3: mod_base = OTHER; note = 2'-O-methyl modified nucleotide with phosphorothioate linkage
  modified_base 29: mod_base = OTHER; note = 2'-O-methyl modified nucleotide
  modified_base 30: mod_base = OTHER; note = 2'-O-methyl modified nucleotide
  modified_base 31: mod_base = OTHER; note = 2'-O-methyl modified nucleotide
  modified_base 32: mod_base = OTHER; note = 2'-O-methyl modified nucleotide
  modified_base 33: mod_base = OTHER; note = 2'-O-methyl modified nucleotide
  modified_base 34: mod_base = OTHER; note = 2'-O-methyl modified nucleotide
  modified_base 35: mod_base = OTHER; note = 2'-O-methyl modified nucleotide
  modified_base 36: mod_base = OTHER; note = 2'-O-methyl modified nucleotide
  modified_base 37: mod_base = OTHER; note = 2'-O-methyl modified nucleotide
  modified_base 38: mod_base = OTHER; note = 2'-O-methyl modified nucleotide
  modified_base 39: mod_base = OTHER; note = 2'-O-methyl modified nucleotide
  modified_base 40: mod_base = OTHER; note = 2'-O-methyl modified nucleotide
  modified_base 69: mod_base = OTHER; note = 2'-O-methyl modified nucleotide
  modified_base 70: mod_base = OTHER; note = 2'-O-methyl modified nucleotide
  modified_base 71: mod_base = OTHER; note = 2'-O-methyl modified nucleotide
  modified_base 72: mod_base = OTHER; note = 2'-O-methyl modified nucleotide
  modified_base 73: mod_base = OTHER; note = 2'-O-methyl modified nucleotide
  modified_base 74: mod_base = OTHER; note = 2'-O-methyl modified nucleotide
  modified_base 75: mod_base = OTHER; note = 2'-O-methyl modified nucleotide
  modified_base 76: mod_base = OTHER; note = 2'-O-methyl modified nucleotide
  modified_base 77: mod_base = OTHER; note = 2'-O-methyl modified nucleotide
  modified_base 78: mod_base = OTHER; note = 2'-O-methyl modified nucleotide
  modified_base 79: mod_base = OTHER; note = 2'-O-methyl modified nucleotide
  modified_base 80: mod_base = OTHER; note = 2'-O-methyl modified nucleotide
  modified_base 81: mod_base = OTHER; note = 2'-O-methyl modified nucleotide
  modified_base 82: mod_base = OTHER; note = 2'-O-methyl modified nucleotide
  modified_base 83: mod_base = OTHER; note = 2'-O-methyl modified nucleotide
  modified_base 84: mod_base = OTHER; note = 2'-O-methyl modified nucleotide
  modified_base 85: mod_base = OTHER; note = 2'-O-methyl modified nucleotide
  modified_base 86: mod_base = OTHER; note = 2'-O-methyl modified nucleotide
  modified_base 87: mod_base = OTHER; note = 2'-O-methyl modified nucleotide
  modified_base 88: mod_base = OTHER; note = 2'-O-methyl modified nucleotide
  modified_base 89: mod_base = OTHER; note = 2'-O-methyl modified nucleotide
  modified_base 90: mod_base = OTHER; note = 2'-O-methyl modified nucleotide
  modified_base 91: mod_base = OTHER; note = 2'-O-methyl modified nucleotide
  modified_base 92: mod_base = OTHER; note = 2'-O-methyl modified nucleotide
  modified_base 93: mod_base = OTHER; note = 2'-O-methyl modified nucleotide
  modified_base 94: mod_base = OTHER; note = 2'-O-methyl modified nucleotide
  modified_base 95: mod_base = OTHER; note = 2'-O-methyl modified nucleotide
  modified_base 96: mod_base = OTHER; note = 2'-O-methyl modified nucleotide
  modified_base 113: mod_base = OTHER; note = Nucleotide with phosphorothioate linkage
  modified_base 114: mod_base = OTHER; note = 2'-O-methyl modified nucleotide with phosphorothioate linkage
  modified_base 115: mod_base = OTHER; note = 2'-O-methyl modified nucleotide with phosphorothioate linkage
  modified_base 116: mod_base = OTHER; note = 2'-O-methyl modified nucleotide
gagaatcaaaatcggtgaatgttttagagctagaaatagcaagttaaaataaggctagtccgttatcaacttgaaaaagtggcaccgagtcggtgcctatttgatgcaccgatttt

SEQ ID NO: 16341 - RNA, 115 nt, synthetic construct
  source 1..115: mol_type = other RNA
  modified_base 1: mod_base = OTHER; note = 2'-O-methyl modified nucleotide with phosphorothioate linkage
  modified_base 2: mod_base = OTHER; note = 2'-O-methyl modified nucleotide with phosphorothioate linkage
  modified_base 3: mod_base = OTHER; note = 2'-O-methyl modified nucleotide with phosphorothioate linkage
  modified_base 29: mod_base = OTHER; note = 2'-O-methyl modified nucleotide
  modified_base 30: mod_base = OTHER; note = 2'-O-methyl modified nucleotide
  modified_base 31: mod_base = OTHER; note = 2'-O-methyl modified nucleotide
  modified_base 32: mod_base = OTHER; note = 2'-O-methyl modified nucleotide
  modified_base 33: mod_base = OTHER; note = 2'-O-methyl modified nucleotide
  modified_base 34: mod_base = OTHER; note = 2'-O-methyl modified nucleotide
  modified_base 35: mod_base = OTHER; note = 2'-O-methyl modified nucleotide
  modified_base 36: mod_base = OTHER; note = 2'-O-methyl modified nucleotide
  modified_base 37: mod_base = OTHER; note = 2'-O-methyl modified nucleotide
  modified_base 38: mod_base = OTHER; note = 2'-O-methyl modified nucleotide
  modified_base 39: mod_base = OTHER; note = 2'-O-methyl modified nucleotide
  modified_base 40: mod_base = OTHER; note = 2'-O-methyl modified nucleotide
  modified_base 69: mod_base = OTHER; note = 2'-O-methyl modified nucleotide
  modified_base 70: mod_base = OTHER; note = 2'-O-methyl modified nucleotide
  modified_base 71: mod_base = OTHER; note = 2'-O-methyl modified nucleotide
  modified_base 72: mod_base = OTHER; note = 2'-O-methyl modified nucleotide
  modified_base 73: mod_base = OTHER; note = 2'-O-methyl modified nucleotide
  modified_base 74: mod_base = OTHER; note = 2'-O-methyl modified nucleotide
  modified_base 75: mod_base = OTHER; note = 2'-O-methyl modified nucleotide
  modified_base 76: mod_base = OTHER; note = 2'-O-methyl modified nucleotide
  modified_base 77: mod_base = OTHER; note = 2'-O-methyl modified nucleotide
  modified_base 78: mod_base = OTHER; note = 2'-O-methyl modified nucleotide
  modified_base 79: mod_base = OTHER; note = 2'-O-methyl modified nucleotide
  modified_base 80: mod_base = OTHER; note = 2'-O-methyl modified nucleotide
  modified_base 81: mod_base = OTHER; note = 2'-O-methyl modified nucleotide
  modified_base 82: mod_base = OTHER; note = 2'-O-methyl modified nucleotide
  modified_base 83: mod_base = OTHER; note = 2'-O-methyl modified nucleotide
  modified_base 84: mod_base = OTHER; note = 2'-O-methyl modified nucleotide
  modified_base 85: mod_base = OTHER; note = 2'-O-methyl modified nucleotide
  modified_base 86: mod_base = OTHER; note = 2'-O-methyl modified nucleotide
  modified_base 87: mod_base = OTHER; note = 2'-O-methyl modified nucleotide
  modified_base 88: mod_base = OTHER; note = 2'-O-methyl modified nucleotide
  modified_base 89: mod_base = OTHER; note = 2'-O-methyl modified nucleotide
  modified_base 90: mod_base = OTHER; note = 2'-O-methyl modified nucleotide
  modified_base 91: mod_base = OTHER; note = 2'-O-methyl modified nucleotide
  modified_base 92: mod_base = OTHER; note = 2'-O-methyl modified nucleotide
  modified_base 93: mod_base = OTHER; note = 2'-O-methyl modified nucleotide
  modified_base 94: mod_base = OTHER; note = 2'-O-methyl modified nucleotide
  modified_base 95: mod_base = OTHER; note = 2'-O-methyl modified nucleotide
  modified_base 96: mod_base = OTHER; note = 2'-O-methyl modified nucleotide
  modified_base 112: mod_base = OTHER; note = Nucleotide with phosphorothioate linkage
  modified_base 113: mod_base = OTHER; note = 2'-O-methyl modified nucleotide with phosphorothioate linkage
  modified_base 114: mod_base = OTHER; note = 2'-O-methyl modified nucleotide with phosphorothioate linkage
  modified_base 115: mod_base = OTHER; note = 2'-O-methyl modified nucleotide
gagaatcaaaatcggtgaatgttttagagctagaaatagcaagttaaaataaggctagtccgttatcaacttgaaaaagtggcaccgagtcggtgcctatttgatgcaccgattt

SEQ ID NO: 16342 - RNA, 114 nt, synthetic construct
  source 1..114: mol_type = other RNA
  modified_base 1: mod_base = OTHER; note = 2'-O-methyl modified nucleotide with phosphorothioate linkage
  modified_base 2: mod_base = OTHER; note = 2'-O-methyl modified nucleotide with phosphorothioate linkage
  modified_base 3: mod_base = OTHER; note = 2'-O-methyl modified nucleotide with phosphorothioate linkage
  modified_base 29: mod_base = OTHER; note = 2'-O-methyl modified nucleotide
  modified_base 30: mod_base = OTHER; note = 2'-O-methyl modified nucleotide
  modified_base 31: mod_base = OTHER; note = 2'-O-methyl modified nucleotide
  modified_base 32: mod_base = OTHER; note = 2'-O-methyl modified nucleotide
  modified_base 33: mod_base = OTHER; note = 2'-O-methyl modified nucleotide
  modified_base 34: mod_base = OTHER; note = 2'-O-methyl modified nucleotide
  modified_base 35: mod_base = OTHER; note = 2'-O-methyl modified nucleotide
  modified_base 36: mod_base = OTHER; note = 2'-O-methyl modified nucleotide
  modified_base 37: mod_base = OTHER; note = 2'-O-methyl modified nucleotide
  modified_base 38: mod_base = OTHER; note = 2'-O-methyl modified nucleotide
  modified_base 39: mod_base = OTHER; note = 2'-O-methyl modified nucleotide
  modified_base 40: mod_base = OTHER; note = 2'-O-methyl modified nucleotide
  modified_base 69: mod_base = OTHER; note = 2'-O-methyl modified nucleotide
  modified_base 70: mod_base = OTHER; note = 2'-O-methyl modified nucleotide
  modified_base 71: mod_base = OTHER; note = 2'-O-methyl modified nucleotide
  modified_base 72: mod_base = OTHER; note = 2'-O-methyl modified nucleotide
  modified_base 73: mod_base = OTHER; note = 2'-O-methyl modified nucleotide
  modified_base 74: mod_base = OTHER; note = 2'-O-methyl modified nucleotide
  modified_base 75: mod_base = OTHER; note = 2'-O-methyl modified nucleotide
  modified_base 76: mod_base = OTHER; note = 2'-O-methyl modified nucleotide
  modified_base 77: mod_base = OTHER; note = 2'-O-methyl modified nucleotide
  modified_base 78: mod_base = OTHER; note = 2'-O-methyl modified nucleotide
  modified_base 79: mod_base = OTHER; note = 2'-O-methyl modified nucleotide
  modified_base 80: mod_base = OTHER; note = 2'-O-methyl modified nucleotide
  modified_base 81: mod_base = OTHER; note = 2'-O-methyl modified nucleotide
  modified_base 82: mod_base = OTHER; note = 2'-O-methyl modified nucleotide
  modified_base 83: mod_base = OTHER; note = 2'-O-methyl modified nucleotide
  modified_base 84: mod_base = OTHER; note = 2'-O-methyl modified nucleotide
  modified_base 85: mod_base = OTHER; note = 2'-O-methyl modified nucleotide
  modified_base 86: mod_base = OTHER; note = 2'-O-methyl modified nucleotide
  modified_base 87: mod_base = OTHER; note = 2'-O-methyl modified nucleotide
  modified_base 88: mod_base = OTHER; note = 2'-O-methyl modified nucleotide
  modified_base 89: mod_base = OTHER; note = 2'-O-methyl modified nucleotide
  modified_base 90: mod_base = OTHER; note = 2'-O-methyl modified nucleotide
  modified_base 91: mod_base = OTHER; note = 2'-O-methyl modified nucleotide
  modified_base 92: mod_base = OTHER; note = 2'-O-methyl modified nucleotide
  modified_base 93: mod_base = OTHER; note = 2'-O-methyl modified nucleotide
  modified_base 94: mod_base = OTHER; note = 2'-O-methyl modified nucleotide
  modified_base 95: mod_base = OTHER; note = 2'-O-methyl modified nucleotide
  modified_base 96: mod_base = OTHER; note = 2'-O-methyl modified nucleotide
  modified_base 111: mod_base = OTHER; note = Nucleotide with phosphorothioate linkage
  modified_base 112: mod_base = OTHER; note = 2'-O-methyl modified nucleotide with phosphorothioate linkage
  modified_base 113: mod_base = OTHER; note = 2'-O-methyl modified nucleotide with phosphorothioate linkage
  modified_base 114: mod_base = OTHER; note = 2'-O-methyl modified nucleotide
gagaatcaaaatcggtgaatgttttagagctagaaatagcaagttaaaataaggctagtccgttatcaacttgaaaaagtggcaccgagtcggtgcctatttgatgcaccgatt

SEQ ID NO: 16343 - RNA, 121 nt, synthetic construct
  source 1..121: mol_type = other RNA
  modified_base 1: mod_base = OTHER; note = 2'-O-methyl modified nucleotide with phosphorothioate linkage
  modified_base 2: mod_base = OTHER; note = 2'-O-methyl modified nucleotide with phosphorothioate linkage
  modified_base 3: mod_base = OTHER; note = 2'-O-methyl modified nucleotide with phosphorothioate linkage
  modified_base 29: mod_base = OTHER; note = 2'-O-methyl modified nucleotide
  modified_base 30: mod_base = OTHER; note = 2'-O-methyl modified nucleotide
  modified_base 31: mod_base = OTHER; note = 2'-O-methyl modified nucleotide
  modified_base 32: mod_base = OTHER; note = 2'-O-methyl modified nucleotide
  modified_base 33: mod_base = OTHER; note = 2'-O-methyl modified nucleotide
  modified_base 34: mod_base = OTHER; note = 2'-O-methyl modified nucleotide
  modified_base 35: mod_base = OTHER; note = 2'-O-methyl modified nucleotide
  modified_base 36: mod_base = OTHER; note = 2'-O-methyl modified nucleotide
  modified_base 37: mod_base = OTHER; note = 2'-O-methyl modified nucleotide
  modified_base 38: mod_base = OTHER; note = 2'-O-methyl modified nucleotide
  modified_base 39: mod_base = OTHER; note = 2'-O-methyl modified nucleotide
  modified_base 40: mod_base = OTHER; note = 2'-O-methyl modified nucleotide
  modified_base 69: mod_base = OTHER; note = 2'-O-methyl modified nucleotide
  modified_base 70: mod_base = OTHER; note = 2'-O-methyl modified nucleotide
  modified_base 71: mod_base = OTHER; note = 2'-O-methyl modified nucleotide
  modified_base 72: mod_base = OTHER; note = 2'-O-methyl modified nucleotide
  modified_base 73: mod_base = OTHER; note = 2'-O-methyl modified nucleotide
  modified_base 74: mod_base = OTHER; note = 2'-O-methyl modified nucleotide
  modified_base 75: mod_base = OTHER; note = 2'-O-methyl modified nucleotide
  modified_base 76: mod_base = OTHER; note = 2'-O-methyl modified nucleotide
  modified_base 77: mod_base = OTHER; note = 2'-O-methyl modified nucleotide
  modified_base 78: mod_base = OTHER; note = 2'-O-methyl modified nucleotide
  modified_base 79: mod_base = OTHER; note = 2'-O-methyl modified nucleotide
  modified_base 80: mod_base = OTHER; note = 2'-O-methyl modified nucleotide
  modified_base 81: mod_base = OTHER; note = 2'-O-methyl modified nucleotide
  modified_base 82: mod_base = OTHER; note = 2'-O-methyl modified nucleotide
  modified_base 83: mod_base = OTHER; note = 2'-O-methyl modified nucleotide
  modified_base 84: mod_base = OTHER; note = 2'-O-methyl modified nucleotide
  modified_base 85: mod_base = OTHER; note = 2'-O-methyl modified nucleotide
  modified_base 86: mod_base = OTHER; note = 2'-O-methyl modified nucleotide
  modified_base 87: mod_base = OTHER; note = 2'-O-methyl modified nucleotide
  modified_base 88: mod_base = OTHER; note = 2'-O-methyl modified nucleotide
  modified_base 89: mod_base = OTHER; note = 2'-O-methyl modified nucleotide
  modified_base 90: mod_base = OTHER; note = 2'-O-methyl modified nucleotide
  modified_base 91: mod_base = OTHER; note = 2'-O-methyl modified nucleotide
  modified_base 92: mod_base = OTHER; note = 2'-O-methyl modified nucleotide
  modified_base 93: mod_base = OTHER; note = 2'-O-methyl modified nucleotide
  modified_base 94: mod_base = OTHER; note = 2'-O-methyl modified nucleotide
  modified_base 95: mod_base = OTHER; note = 2'-O-methyl modified nucleotide
  modified_base 96: mod_base = OTHER; note = 2'-O-methyl modified nucleotide
  modified_base 118: mod_base = OTHER; note = Nucleotide with phosphorothioate linkage
  modified_base 119: mod_base = OTHER; note = 2'-O-methyl modified nucleotide with phosphorothioate linkage
  modified_base 120: mod_base = OTHER; note = 2'-O-methyl modified nucleotide with phosphorothioate linkage
  modified_base 121: mod_base = OTHER; note = 2'-O-methyl modified nucleotide
gagaatcaaaatcggtgaatgttttagagctagaaatagcaagttaaaataaggctagtccgttatcaacttgaaaaagtggcaccgagtcggtgcgcctatttgatgcaccgattttgat

SEQ ID NO: 16344 - RNA, 120 nt, synthetic construct
  source 1..120: mol_type = other RNA
  modified_base 1: mod_base = OTHER; note = 2'-O-methyl modified nucleotide with phosphorothioate linkage
  modified_base 2: mod_base = OTHER; note = 2'-O-methyl modified nucleotide with phosphorothioate linkage
  modified_base 3: mod_base = OTHER; note = 2'-O-methyl modified nucleotide with phosphorothioate linkage
  modified_base 29: mod_base = OTHER; note = 2'-O-methyl modified nucleotide
  modified_base 30: mod_base = OTHER; note = 2'-O-methyl modified nucleotide
  modified_base 31: mod_base = OTHER; note = 2'-O-methyl modified nucleotide
  modified_base 32: mod_base = OTHER; note = 2'-O-methyl modified nucleotide
  modified_base 33: mod_base = OTHER; note = 2'-O-methyl modified nucleotide
  modified_base 34: mod_base = OTHER; note = 2'-O-methyl modified nucleotide
  modified_base 35: mod_base = OTHER; note = 2'-O-methyl modified nucleotide
  modified_base 36: mod_base = OTHER; note = 2'-O-methyl modified nucleotide
  modified_base 37: mod_base = OTHER; note = 2'-O-methyl modified nucleotide
  modified_base 38: mod_base = OTHER; note = 2'-O-methyl modified nucleotide
  modified_base 39: mod_base = OTHER; note = 2'-O-methyl modified nucleotide
  modified_base 40: mod_base = OTHER; note = 2'-O-methyl modified nucleotide
  modified_base 69: mod_base = OTHER; note = 2'-O-methyl modified nucleotide
  modified_base 70: mod_base = OTHER; note = 2'-O-methyl modified nucleotide
  modified_base 71: mod_base = OTHER; note = 2'-O-methyl modified nucleotide
  modified_base 72: mod_base = OTHER; note = 2'-O-methyl modified nucleotide
  modified_base 73: mod_base = OTHER; note = 2'-O-methyl modified nucleotide
  modified_base 74: mod_base = OTHER; note = 2'-O-methyl modified nucleotide
  modified_base 75: mod_base = OTHER; note = 2'-O-methyl modified nucleotide
  modified_base 76: mod_base = OTHER; note = 2'-O-methyl modified nucleotide
  modified_base 77: mod_base = OTHER; note = 2'-O-methyl modified nucleotide
  modified_base 78: mod_base = OTHER; note = 2'-O-methyl modified nucleotide
  modified_base 79: mod_base = OTHER; note = 2'-O-methyl modified nucleotide
  modified_base 80: mod_base = OTHER; note = 2'-O-methyl modified nucleotide
  modified_base 81: mod_base = OTHER; note = 2'-O-methyl modified nucleotide
  modified_base 82: mod_base = OTHER; note = 2'-O-methyl modified nucleotide
  modified_base 83: mod_base = OTHER; note = 2'-O-methyl modified nucleotide
  modified_base 84: mod_base = OTHER; note = 2'-O-methyl modified nucleotide
  modified_base 85: mod_base = OTHER; note = 2'-O-methyl modified nucleotide
  modified_base 86: mod_base = OTHER; note = 2'-O-methyl modified nucleotide
  modified_base 87: mod_base = OTHER; note = 2'-O-methyl modified nucleotide
  modified_base 88: mod_base = OTHER; note = 2'-O-methyl modified nucleotide
  modified_base 89: mod_base = OTHER; note = 2'-O-methyl modified nucleotide
  modified_base 90: mod_base = OTHER; note = 2'-O-methyl modified nucleotide
  modified_base 91: mod_base = OTHER; note = 2'-O-methyl modified nucleotide
  modified_base 92: mod_base = OTHER; note = 2'-O-methyl modified nucleotide
  modified_base 93: mod_base = OTHER; note = 2'-O-methyl modified nucleotide
  modified_base 94: mod_base = OTHER; note = 2'-O-methyl modified nucleotide
  modified_base 95: mod_base = OTHER; note = 2'-O-methyl modified nucleotide
  modified_base 96: mod_base = OTHER; note = 2'-O-methyl modified nucleotide
  modified_base 117: mod_base = OTHER; note = Nucleotide with phosphorothioate linkage
  modified_base 118: mod_base = OTHER; note = 2'-O-methyl modified nucleotide with phosphorothioate linkage
  modified_base 119: mod_base = OTHER; note = 2'-O-methyl modified nucleotide with phosphorothioate linkage
  modified_base 120: mod_base = OTHER; note = 2'-O-methyl modified nucleotide
gagaatcaaaatcggtgaatgttttagagctagaaatagcaagttaaaataaggctagtccgttatcaacttgaaaaagtggcaccgagtcggtgcgcctatttgatgcaccgattttga

SEQ ID NO: 16345 - RNA, 119 nt, synthetic construct
  source 1..119: mol_type = other RNA
  modified_base 1: mod_base = OTHER; note = 2'-O-methyl modified nucleotide with phosphorothioate linkage
  modified_base 2: mod_base = OTHER; note = 2'-O-methyl modified nucleotide with phosphorothioate linkage
  modified_base 3: mod_base = OTHER; note = 2'-O-methyl modified nucleotide with phosphorothioate linkage
  modified_base 29: mod_base = OTHER; note = 2'-O-methyl modified nucleotide
  modified_base 30: mod_base = OTHER; note = 2'-O-methyl modified nucleotide
  modified_base 31: mod_base = OTHER; note = 2'-O-methyl modified nucleotide
  modified_base 32: mod_base = OTHER; note = 2'-O-methyl modified nucleotide
  modified_base 33: mod_base = OTHER; note = 2'-O-methyl modified nucleotide
  modified_base 34: mod_base = OTHER; note = 2'-O-methyl modified nucleotide
  modified_base 35: mod_base = OTHER; note = 2'-O-methyl modified nucleotide
  modified_base 36: mod_base = OTHER; note = 2'-O-methyl modified nucleotide
  modified_base 37: mod_base = OTHER; note = 2'-O-methyl modified nucleotide
  modified_base 38: mod_base = OTHER; note = 2'-O-methyl modified nucleotide
  modified_base 39: mod_base = OTHER; note = 2'-O-methyl modified nucleotide
  modified_base 40: mod_base = OTHER; note = 2'-O-methyl modified nucleotide
  modified_base 69: mod_base = OTHER; note = 2'-O-methyl modified nucleotide
  modified_base 70: mod_base = OTHER; note = 2'-O-methyl modified nucleotide
  modified_base 71: mod_base = OTHER; note = 2'-O-methyl modified nucleotide
  modified_base 72: mod_base = OTHER; note = 2'-O-methyl modified nucleotide
  modified_base 73: mod_base = OTHER; note = 2'-O-methyl modified nucleotide
  modified_base 74: mod_base = OTHER; note = 2'-O-methyl modified nucleotide
  modified_base 75: mod_base = OTHER; note = 2'-O-methyl modified nucleotide
  modified_base 76: mod_base = OTHER; note = 2'-O-methyl modified nucleotide
  modified_base 77: mod_base = OTHER; note = 2'-O-methyl modified nucleotide
  modified_base 78: mod_base = OTHER; note = 2'-O-methyl modified nucleotide
  modified_base 79: mod_base = OTHER; note = 2'-O-methyl modified nucleotide
  modified_base 80: mod_base = OTHER; note = 2'-O-methyl modified nucleotide
  modified_base 81: mod_base = OTHER; note = 2'-O-methyl modified nucleotide
  modified_base 82: mod_base = OTHER; note = 2'-O-methyl modified nucleotide
  modified_base 83: mod_base = OTHER; note = 2'-O-methyl modified nucleotide
  modified_base 84: mod_base = OTHER; note = 2'-O-methyl modified nucleotide
  modified_base 85: mod_base = OTHER; note = 2'-O-methyl modified nucleotide
  modified_base 86: mod_base = OTHER; note = 2'-O-methyl modified nucleotide
  modified_base 87: mod_base = OTHER; note = 2'-O-methyl modified nucleotide
  modified_base 88: mod_base = OTHER; note = 2'-O-methyl modified nucleotide
  modified_base 89: mod_base = OTHER; note = 2'-O-methyl modified nucleotide
  modified_base 90: mod_base = OTHER; note = 2'-O-methyl modified nucleotide
  modified_base 91: mod_base = OTHER; note = 2'-O-methyl modified nucleotide
  modified_base 92: mod_base = OTHER; note = 2'-O-methyl modified nucleotide
  modified_base 93: mod_base = OTHER; note = 2'-O-methyl modified nucleotide
  modified_base 94: mod_base = OTHER; note = 2'-O-methyl modified nucleotide
  modified_base 95: mod_base = OTHER; note = 2'-O-methyl modified nucleotide
  modified_base 96: mod_base = OTHER; note = 2'-O-methyl modified nucleotide
  modified_base 116: mod_base = OTHER; note = Nucleotide with phosphorothioate linkage
  modified_base 117: mod_base = OTHER; note = 2'-O-methyl modified nucleotide with phosphorothioate linkage
  modified_base 118: mod_base = OTHER; note = 2'-O-methyl modified nucleotide with phosphorothioate linkage
  modified_base 119: mod_base = OTHER; note = 2'-O-methyl modified nucleotide
gagaatcaaaatcggtgaatgttttagagctagaaatagcaagttaaaataaggctagtccgttatcaacttgaaaaagtggcaccgagtcggtgcgcctatttgatgcaccgattttg

SEQ ID NO: 16346 - RNA, 118 nt, synthetic construct
  source 1..118: mol_type = other RNA
  modified_base 1: mod_base = OTHER; note = 2'-O-methyl modified nucleotide with phosphorothioate linkage
  modified_base 2: mod_base = OTHER; note = 2'-O-methyl modified nucleotide with phosphorothioate linkage
  modified_base 3: mod_base = OTHER; note = 2'-O-methyl modified nucleotide with phosphorothioate linkage
  modified_base 29: mod_base = OTHER; note = 2'-O-methyl modified nucleotide
  modified_base 30: mod_base = OTHER; note = 2'-O-methyl modified nucleotide
  modified_base 31: mod_base = OTHER; note = 2'-O-methyl modified nucleotide
  modified_base 32: mod_base = OTHER; note = 2'-O-methyl modified nucleotide
  modified_base 33: mod_base = OTHER; note = 2'-O-methyl modified nucleotide
  modified_base 34: mod_base = OTHER; note = 2'-O-methyl modified nucleotide
  modified_base 35: mod_base = OTHER; note = 2'-O-methyl modified nucleotide
  modified_base 36: mod_base = OTHER; note = 2'-O-methyl modified nucleotide
  modified_base 37: mod_base = OTHER; note = 2'-O-methyl modified nucleotide
  modified_base 38: mod_base = OTHER; note = 2'-O-methyl modified nucleotide
  modified_base 39: mod_base = OTHER; note = 2'-O-methyl modified nucleotide
  modified_base 40: mod_base = OTHER; note = 2'-O-methyl modified nucleotide
  modified_base 69: mod_base = OTHER; note = 2'-O-methyl modified nucleotide
  modified_base 70: mod_base = OTHER; note = 2'-O-methyl modified nucleotide
  modified_base 71: mod_base = OTHER; note = 2'-O-methyl modified nucleotide
  modified_base 72: mod_base = OTHER; note = 2'-O-methyl modified nucleotide
  modified_base 73: mod_base = OTHER; note = 2'-O-methyl modified nucleotide
  modified_base 74: mod_base = OTHER; note = 2'-O-methyl modified nucleotide
  modified_base 75: mod_base = OTHER; note = 2'-O-methyl modified nucleotide
  modified_base 76: mod_base = OTHER; note = 2'-O-methyl modified nucleotide
  modified_base 77: mod_base = OTHER; note = 2'-O-methyl modified nucleotide
  modified_base 78: mod_base = OTHER; note = 2'-O-methyl modified nucleotide
  modified_base 79: mod_base = OTHER; note = 2'-O-methyl modified nucleotide
  modified_base 80: mod_base = OTHER; note = 2'-O-methyl modified nucleotide
  modified_base 81: mod_base = OTHER; note = 2'-O-methyl modified nucleotide
  modified_base 82: mod_base = OTHER; note = 2'-O-methyl modified nucleotide
  modified_base 83: mod_base = OTHER; note = 2'-O-methyl modified nucleotide
  modified_base 84: mod_base = OTHER; note = 2'-O-methyl modified nucleotide
  modified_base 85: mod_base = OTHER; note = 2'-O-methyl modified nucleotide
  modified_base 86: mod_base = OTHER; note = 2'-O-methyl modified nucleotide
  modified_base 87: mod_base = OTHER; note = 2'-O-methyl modified nucleotide
  modified_base 88: mod_base = OTHER; note = 2'-O-methyl modified nucleotide
  modified_base 89: mod_base = OTHER; note = 2'-O-methyl modified nucleotide
  modified_base 90: mod_base = OTHER; note = 2'-O-methyl modified nucleotide
  modified_base 91: mod_base = OTHER; note = 2'-O-methyl modified nucleotide
  modified_base 92: mod_base = OTHER; note = 2'-O-methyl modified nucleotide
  modified_base 93: mod_base = OTHER; note = 2'-O-methyl modified nucleotide
  modified_base 94: mod_base = OTHER; note = 2'-O-methyl modified nucleotide
  modified_base 95: mod_base = OTHER; note = 2'-O-methyl modified nucleotide
  modified_base 96: mod_base = OTHER; note = 2'-O-methyl modified nucleotide
  modified_base 115: mod_base = OTHER; note = Nucleotide with phosphorothioate linkage
  modified_base 116: mod_base = OTHER; note = 2'-O-methyl modified nucleotide with phosphorothioate linkage
  modified_base 117: mod_base = OTHER; note = 2'-O-methyl modified nucleotide with phosphorothioate linkage
  modified_base 118: mod_base = OTHER; note = 2'-O-methyl modified nucleotide
gagaatcaaaatcggtgaatgttttagagctagaaatagcaagttaaaataaggctagtccgttatcaacttgaaaaagtggcaccgagtcggtgcgcctatttgatgcaccgatttt

SEQ ID NO: 16347 - RNA, 117 nt, synthetic construct
  source 1..117: mol_type = other RNA
  modified_base 1: mod_base = OTHER; note = 2'-O-methyl modified nucleotide with phosphorothioate linkage
  modified_base 2: mod_base = OTHER; note = 2'-O-methyl modified nucleotide with phosphorothioate linkage
  modified_base 3: mod_base = OTHER; note = 2'-O-methyl modified nucleotide with phosphorothioate linkage
  modified_base 29: mod_base = OTHER; note = 2'-O-methyl modified nucleotide
  modified_base 30: mod_base = OTHER; note = 2'-O-methyl modified nucleotide
  modified_base 31: mod_base = OTHER; note = 2'-O-methyl modified nucleotide
  modified_base 32: mod_base = OTHER; note = 2'-O-methyl modified nucleotide
  modified_base 33: mod_base = OTHER; note = 2'-O-methyl modified nucleotide
  modified_base 34: mod_base = OTHER; note = 2'-O-methyl modified nucleotide
  modified_base 35: mod_base = OTHER; note = 2'-O-methyl modified nucleotide
  modified_base 36: mod_base = OTHER; note = 2'-O-methyl modified nucleotide
  modified_base 37: mod_base = OTHER; note = 2'-O-methyl modified nucleotide
  modified_base 38: mod_base = OTHER; note = 2'-O-methyl modified nucleotide
  modified_base 39: mod_base = OTHER; note = 2'-O-methyl modified nucleotide
  modified_base 40: mod_base = OTHER; note = 2'-O-methyl modified nucleotide
  modified_base 69: mod_base = OTHER; note = 2'-O-methyl modified nucleotide
  modified_base 70: mod_base = OTHER; note = 2'-O-methyl modified nucleotide
  modified_base 71: mod_base = OTHER; note = 2'-O-methyl modified nucleotide
  modified_base 72: mod_base = OTHER; note = 2'-O-methyl modified nucleotide
  modified_base 73: mod_base = OTHER; note = 2'-O-methyl modified nucleotide
  modified_base 74: mod_base = OTHER; note = 2'-O-methyl modified nucleotide
  modified_base 75: mod_base = OTHER; note = 2'-O-methyl modified nucleotide
  modified_base 76: mod_base = OTHER; note = 2'-O-methyl modified nucleotide
  modified_base 77: mod_base = OTHER; note = 2'-O-methyl modified nucleotide
  modified_base 78: mod_base = OTHER; note = 2'-O-methyl modified nucleotide
  modified_base 79: mod_base = OTHER; note = 2'-O-methyl modified nucleotide
  modified_base 80: mod_base = OTHER; note = 2'-O-methyl modified nucleotide
  modified_base 81: mod_base = OTHER; note = 2'-O-methyl modified nucleotide
  modified_base 82: mod_base = OTHER; note = 2'-O-methyl modified nucleotide
  modified_base 83: mod_base = OTHER; note = 2'-O-methyl modified nucleotide
  modified_base 84: mod_base = OTHER; note = 2'-O-methyl modified nucleotide
  modified_base 85: mod_base = OTHER; note = 2'-O-methyl modified nucleotide
  modified_base 86: mod_base = OTHER; note = 2'-O-methyl modified nucleotide
  modified_base 87: mod_base = OTHER; note = 2'-O-methyl modified nucleotide
  modified_base 88: mod_base = OTHER; note = 2'-O-methyl modified nucleotide
  modified_base 89: mod_base = OTHER; note = 2'-O-methyl modified nucleotide
  modified_base 90: mod_base = OTHER; note = 2'-O-methyl modified nucleotide
  modified_base 91: mod_base = OTHER; note = 2'-O-methyl modified nucleotide
  modified_base 92: mod_base = OTHER; note = 2'-O-methyl modified nucleotide
  modified_base 93: mod_base = OTHER; note = 2'-O-methyl modified nucleotide
  modified_base 94: mod_base = OTHER; note = 2'-O-methyl modified nucleotide
  modified_base 95: mod_base = OTHER; note = 2'-O-methyl modified nucleotide
  modified_base 96: mod_base = OTHER; note = 2'-O-methyl modified nucleotide
  modified_base 114: mod_base = OTHER; note = Nucleotide with phosphorothioate linkage
  modified_base 115: mod_base = OTHER; note = 2'-O-methyl modified nucleotide with phosphorothioate linkage
  modified_base 116: mod_base = OTHER; note = 2'-O-methyl modified nucleotide with phosphorothioate linkage
  modified_base 117: mod_base = OTHER; note = 2'-O-methyl modified nucleotide
gagaatcaaaatcggtgaatgttttagagctagaaatagcaagttaaaataaggctagtccgttatcaacttgaaaaagtggcaccgagtcggtgcgcctatttgatgcaccgattt

SEQ ID NO: 16348 - RNA, 116 nt, synthetic construct
  source 1..116: mol_type = other RNA
  modified_base 1: mod_base = OTHER; note = 2'-O-methyl modified nucleotide with phosphorothioate linkage
  modified_base 2: mod_base = OTHER; note = 2'-O-methyl modified nucleotide with phosphorothioate linkage
  modified_base 3: mod_base = OTHER; note = 2'-O-methyl modified nucleotide with phosphorothioate linkage
  modified_base 29: mod_base = OTHER; note = 2'-O-methyl modified nucleotide
  modified_base 30: mod_base = OTHER; note = 2'-O-methyl modified nucleotide
  modified_base 31: mod_base = OTHER; note = 2'-O-methyl modified nucleotide
  modified_base 32: mod_base = OTHER; note = 2'-O-methyl modified nucleotide
  modified_base 33: mod_base = OTHER; note = 2'-O-methyl modified nucleotide
  modified_base 34: mod_base = OTHER; note = 2'-O-methyl modified nucleotide
  modified_base 35: mod_base = OTHER; note = 2'-O-methyl modified nucleotide
  modified_base 36: mod_base = OTHER; note = 2'-O-methyl modified nucleotide
  modified_base 37: mod_base = OTHER; note = 2'-O-methyl modified nucleotide
  modified_base 38: mod_base = OTHER; note = 2'-O-methyl modified nucleotide
  modified_base 39: mod_base = OTHER; note = 2'-O-methyl modified nucleotide
  modified_base 40: mod_base = OTHER; note = 2'-O-methyl modified nucleotide
  modified_base 69: mod_base = OTHER; note = 2'-O-methyl modified nucleotide
  modified_base 70: mod_base = OTHER; note = 2'-O-methyl modified nucleotide
  modified_base 71: mod_base = OTHER; note = 2'-O-methyl modified nucleotide
  modified_base 72: mod_base = OTHER; note = 2'-O-methyl modified nucleotide
  modified_base 73: mod_base = OTHER; note = 2'-O-methyl modified nucleotide
  modified_base 74: mod_base = OTHER; note = 2'-O-methyl modified nucleotide
  modified_base 75: mod_base = OTHER; note = 2'-O-methyl modified nucleotide
  modified_base 76: mod_base = OTHER; note = 2'-O-methyl modified nucleotide
  modified_base 77: mod_base = OTHER; note = 2'-O-methyl modified nucleotide
  modified_base 78: mod_base = OTHER; note = 2'-O-methyl modified nucleotide
  modified_base 79: mod_base = OTHER; note = 2'-O-methyl modified nucleotide
  modified_base 80: mod_base = OTHER; note = 2'-O-methyl modified nucleotide
  modified_base 81: mod_base = OTHER; note = 2'-O-methyl modified nucleotide
  modified_base 82: mod_base = OTHER; note = 2'-O-methyl modified nucleotide
  modified_base 83: mod_base = OTHER; note = 2'-O-methyl modified nucleotide
  modified_base 84: mod_base = OTHER; note = 2'-O-methyl modified nucleotide
  modified_base 85: mod_base = OTHER; note = 2'-O-methyl modified nucleotide
  modified_base 86: mod_base = OTHER; note = 2'-O-methyl modified nucleotide
  modified_base 87: mod_base = OTHER; note = 2'-O-methyl modified nucleotide
  modified_base 88: mod_base = OTHER; note = 2'-O-methyl modified nucleotide
  modified_base 89: mod_base = OTHER; note = 2'-O-methyl modified nucleotide
  modified_base 90: mod_base = OTHER; note = 2'-O-methyl modified nucleotide
  modified_base 91: mod_base = OTHER; note = 2'-O-methyl modified nucleotide
  modified_base 92: mod_base = OTHER; note = 2'-O-methyl modified nucleotide
  modified_base 93: mod_base = OTHER; note = 2'-O-methyl modified nucleotide
  modified_base 94: mod_base = OTHER; note = 2'-O-methyl modified nucleotide
  modified_base 95: mod_base = OTHER; note = 2'-O-methyl modified nucleotide
  modified_base 96: mod_base = OTHER; note = 2'-O-methyl modified nucleotide
  modified_base 113: mod_base = OTHER; note = Nucleotide with phosphorothioate linkage
  modified_base 114: mod_base = OTHER; note = 2'-O-methyl modified nucleotide with phosphorothioate linkage
  modified_base 115: mod_base = OTHER; note = 2'-O-methyl modified nucleotide with phosphorothioate linkage
  modified_base 116: mod_base = OTHER; note = 2'-O-methyl modified nucleotide
gagaatcaaaatcggtgaatgttttagagctagaaatagcaagttaaaataaggctagtccgttatcaacttgaaaaagtggcaccgagtcggtgcgcctatttgatgcaccgatt

SEQ ID NO: 16349 - RNA, 123 nt, synthetic construct
  source 1..123: mol_type = other RNA
  modified_base 1: mod_base = OTHER; note = 2'-O-methyl modified nucleotide with phosphorothioate linkage
  modified_base 2: mod_base = OTHER; note = 2'-O-methyl modified nucleotide with phosphorothioate linkage
  modified_base 3: mod_base = OTHER; note = 2'-O-methyl modified nucleotide with phosphorothioate linkage
  modified_base 29: mod_base = OTHER; note = 2'-O-methyl modified nucleotide
  modified_base 30: mod_base = OTHER; note = 2'-O-methyl modified nucleotide
  modified_base 31: mod_base = OTHER; note = 2'-O-methyl modified nucleotide
  modified_base 32: mod_base = OTHER; note = 2'-O-methyl modified nucleotide
  modified_base 33: mod_base = OTHER; note = 2'-O-methyl modified nucleotide
  modified_base 34: mod_base = OTHER; note = 2'-O-methyl modified nucleotide
  modified_base 35: mod_base = OTHER; note = 2'-O-methyl modified nucleotide
  modified_base 36: mod_base = OTHER; note = 2'-O-methyl modified nucleotide
  modified_base 37: mod_base = OTHER; note = 2'-O-methyl modified nucleotide
  modified_base 38: mod_base = OTHER; note = 2'-O-methyl modified nucleotide
  modified_base 39: mod_base = OTHER; note = 2'-O-methyl modified nucleotide
  modified_base 40: mod_base = OTHER; note = 2'-O-methyl modified nucleotide
  modified_base 69: mod_base = OTHER; note = 2'-O-methyl modified nucleotide
  modified_base 70: mod_base = OTHER; note = 2'-O-methyl modified nucleotide
  modified_base 71: mod_base = OTHER; note = 2'-O-methyl modified nucleotide
  modified_base 72: mod_base = OTHER; note = 2'-O-methyl modified nucleotide
  modified_base 73: mod_base = OTHER; note = 2'-O-methyl modified nucleotide
  modified_base 74: mod_base = OTHER; note = 2'-O-methyl modified nucleotide
  modified_base 75: mod_base = OTHER; note = 2'-O-methyl modified nucleotide
  modified_base 76: mod_base = OTHER; note = 2'-O-methyl modified nucleotide
  modified_base 77: mod_base = OTHER; note = 2'-O-methyl modified nucleotide
  modified_base 78: mod_base = OTHER; note = 2'-O-methyl modified nucleotide
  modified_base 79: mod_base = OTHER; note = 2'-O-methyl modified nucleotide
  modified_base 80: mod_base = OTHER; note = 2'-O-methyl modified nucleotide
  modified_base 81: mod_base = OTHER; note = 2'-O-methyl modified nucleotide
  modified_base 82: mod_base = OTHER; note = 2'-O-methyl modified nucleotide
  modified_base 83: mod_base = OTHER; note = 2'-O-methyl modified nucleotide
  modified_base 84: mod_base = OTHER; note = 2'-O-methyl modified nucleotide
  modified_base 85: mod_base = OTHER; note = 2'-O-methyl modified nucleotide
  modified_base 86: mod_base = OTHER; note = 2'-O-methyl modified nucleotide
  modified_base 87: mod_base = OTHER; note = 2'-O-methyl modified nucleotide
  modified_base 88: mod_base = OTHER; note = 2'-O-methyl modified nucleotide
  modified_base 89: mod_base = OTHER; note = 2'-O-methyl modified nucleotide
  modified_base 90: mod_base = OTHER; note = 2'-O-methyl modified nucleotide
  modified_base 91: mod_base = OTHER; note = 2'-O-methyl modified nucleotide
  modified_base 92: mod_base = OTHER; note = 2'-O-methyl modified nucleotide
  modified_base 93: mod_base = OTHER; note = 2'-O-methyl modified nucleotide
  modified_base 94: mod_base = OTHER; note = 2'-O-methyl modified nucleotide
  modified_base 95: mod_base = OTHER; note = 2'-O-methyl modified nucleotide
  modified_base 96: mod_base = OTHER; note = 2'-O-methyl modified nucleotide
  modified_base 120: mod_base = OTHER; note = Nucleotide with phosphorothioate linkage
  modified_base 121: mod_base = OTHER; note = 2'-O-methyl modified nucleotide with phosphorothioate linkage
  modified_base 122: mod_base = OTHER; note = 2'-O-methyl modified nucleotide with phosphorothioate linkage
  modified_base 123: mod_base = OTHER; note = 2'-O-methyl modified nucleotide
gagaatcaaaatcggtgaatgttttagagctagaaatagcaagttaaaataaggctagtccgttatcaacttgaaaaagtggcaccgagtcggtgcctgcctatttgatgcaccgattttgat

SEQ ID NO: 16350 - RNA, 122 nt, synthetic construct
  source 1..122: mol_type = other RNA
  modified_base 1: mod_base = OTHER; note = 2'-O-methyl modified nucleotide with phosphorothioate linkage
  modified_base 2: mod_base = OTHER; note = 2'-O-methyl modified nucleotide with phosphorothioate linkage
  modified_base 3: mod_base = OTHER; note = 2'-O-methyl modified nucleotide with phosphorothioate linkage
  modified_base 29: mod_base = OTHER; note = 2'-O-methyl modified nucleotide
  modified_base 30: mod_base = OTHER; note = 2'-O-methyl modified nucleotide
  modified_base 31: mod_base = OTHER; note = 2'-O-methyl modified nucleotide
  modified_base 32: mod_base = OTHER; note = 2'-O-methyl modified nucleotide
  modified_base 33: mod_base = OTHER; note = 2'-O-methyl modified nucleotide
  modified_base 34: mod_base = OTHER; note = 2'-O-methyl modified nucleotide
  modified_base 35: mod_base = OTHER; note = 2'-O-methyl modified nucleotide
  modified_base 36: mod_base = OTHER; note = 2'-O-methyl modified nucleotide
  modified_base 37: mod_base = OTHER; note = 2'-O-methyl modified nucleotide
  modified_base 38: mod_base = OTHER; note = 2'-O-methyl modified nucleotide
  modified_base 39: mod_base = OTHER; note = 2'-O-methyl modified nucleotide
  modified_base 40: mod_base = OTHER; note = 2'-O-methyl modified nucleotide
  modified_base 69: mod_base = OTHER; note = 2'-O-methyl modified nucleotide
  modified_base 70: mod_base = OTHER; note = 2'-O-methyl modified nucleotide
  modified_base 71: mod_base = OTHER; note = 2'-O-methyl modified nucleotide
  modified_base 72: mod_base = OTHER; note = 2'-O-methyl modified nucleotide
  modified_base 73: mod_base = OTHER; note = 2'-O-methyl modified nucleotide
  modified_base 74: mod_base = OTHER; note = 2'-O-methyl modified nucleotide
  modified_base 75: mod_base = OTHER; note = 2'-O-methyl modified nucleotide
  modified_base 76: mod_base = OTHER; note = 2'-O-methyl modified nucleotide
  modified_base 77: mod_base = OTHER; note = 2'-O-methyl modified nucleotide
  modified_base 78: mod_base = OTHER; note = 2'-O-methyl modified nucleotide
  modified_base 79: mod_base = OTHER; note = 2'-O-methyl modified nucleotide
  modified_base 80: mod_base = OTHER; note = 2'-O-methyl modified nucleotide
  modified_base 81: mod_base = OTHER; note = 2'-O-methyl modified nucleotide
  modified_base 82: mod_base = OTHER; note = 2'-O-methyl modified nucleotide
  modified_base 83: mod_base = OTHER; note = 2'-O-methyl modified nucleotide
  modified_base 84: mod_base = OTHER; note = 2'-O-methyl modified nucleotide
  modified_base 85: mod_base = OTHER; note = 2'-O-methyl modified nucleotide
  modified_base 86: mod_base = OTHER; note = 2'-O-methyl modified nucleotide
  modified_base 87: mod_base = OTHER; note = 2'-O-methyl modified nucleotide
  modified_base 88: mod_base = OTHER; note = 2'-O-methyl modified nucleotide
  modified_base 89: mod_base = OTHER; note = 2'-O-methyl modified nucleotide
  modified_base 90: mod_base = OTHER; note = 2'-O-methyl modified nucleotide
  modified_base 91: mod_base = OTHER; note = 2'-O-methyl modified nucleotide
  modified_base 92: mod_base = OTHER; note = 2'-O-methyl modified nucleotide
  modified_base 93: mod_base = OTHER; note = 2'-O-methyl modified nucleotide
  modified_base 94: mod_base = OTHER; note = 2'-O-methyl modified nucleotide
  modified_base 95: mod_base = OTHER; note = 2'-O-methyl modified nucleotide
  modified_base 96: mod_base = OTHER; note = 2'-O-methyl modified nucleotide
  modified_base 119: mod_base = OTHER; note = Nucleotide with phosphorothioate linkage
  modified_base 120: mod_base = OTHER; note = 2'-O-methyl modified nucleotide with phosphorothioate linkage
  modified_base 121: mod_base = OTHER; note = 2'-O-methyl modified nucleotide with phosphorothioate linkage
  modified_base 122: mod_base = OTHER; note = 2'-O-methyl modified nucleotide
gagaatcaaaatcggtgaatgttttagagctagaaatagcaagttaaaataaggctagtccgttatcaacttgaaaaagtggcaccgagtcggtgcctgcctatttgatgcaccgattttga

SEQ ID NO: 16351 - RNA, 121 nt, synthetic construct
  source 1..121: mol_type = other RNA
  modified_base 1: mod_base = OTHER; note = 2'-O-methyl modified nucleotide with phosphorothioate linkage
  modified_base 2: mod_base = OTHER; note = 2'-O-methyl modified nucleotide with phosphorothioate linkage
  modified_base 3: mod_base = OTHER; note = 2'-O-methyl modified nucleotide with phosphorothioate linkage
  modified_base 29: mod_base = OTHER; note = 2'-O-methyl modified nucleotide
  modified_base 30: mod_base = OTHER; note = 2'-O-methyl modified nucleotide
  modified_base 31: mod_base = OTHER; note = 2'-O-methyl modified nucleotide
  modified_base 32: mod_base = OTHER; note = 2'-O-methyl modified nucleotide
  modified_base 33: mod_base = OTHER; note = 2'-O-methyl modified nucleotide
  modified_base 34: mod_base = OTHER; note = 2'-O-methyl modified nucleotide
  modified_base 35: mod_base = OTHER; note = 2'-O-methyl modified nucleotide
  modified_base 36: mod_base = OTHER; note = 2'-O-methyl modified nucleotide
  modified_base 37: mod_base = OTHER; note = 2'-O-methyl modified nucleotide
  modified_base 38: mod_base = OTHER; note = 2'-O-methyl modified nucleotide
  modified_base 39: mod_base = OTHER; note = 2'-O-methyl modified nucleotide
  modified_base 40: mod_base = OTHER; note = 2'-O-methyl modified nucleotide
  modified_base 69: mod_base = OTHER; note = 2'-O-methyl modified nucleotide
  modified_base 70: mod_base = OTHER; note = 2'-O-methyl modified nucleotide
  modified_base 71: mod_base = OTHER; note = 2'-O-methyl modified nucleotide
  modified_base 72: mod_base = OTHER; note = 2'-O-methyl modified nucleotide
  modified_base 73: mod_base = OTHER; note = 2'-O-methyl modified nucleotide
  modified_base 74: mod_base = OTHER; note = 2'-O-methyl modified nucleotide
  modified_base 75: mod_base = OTHER; note = 2'-O-methyl modified nucleotide
  modified_base 76: mod_base = OTHER; note = 2'-O-methyl modified nucleotide
  modified_base 77: mod_base = OTHER; note = 2'-O-methyl modified nucleotide
  modified_base 78: mod_base = OTHER; note = 2'-O-methyl modified nucleotide
  modified_base 79: mod_base = OTHER; note = 2'-O-methyl modified nucleotide
  modified_base 80: mod_base = OTHER; note = 2'-O-methyl modified nucleotide
  modified_base 81: mod_base = OTHER; note = 2'-O-methyl modified nucleotide
  modified_base 82: mod_base = OTHER; note = 2'-O-methyl modified nucleotide
  modified_base 83: mod_base = OTHER; note = 2'-O-methyl modified nucleotide
  modified_base 84: mod_base = OTHER; note = 2'-O-methyl modified nucleotide
  modified_base 85: mod_base = OTHER; note = 2'-O-methyl modified nucleotide
  modified_base 86: mod_base = OTHER; note = 2'-O-methyl modified nucleotide
  modified_base 87: mod_base = OTHER; note = 2'-O-methyl modified nucleotide
  modified_base 88: mod_base = OTHER; note = 2'-O-methyl modified nucleotide
  modified_base 89: mod_base = OTHER; note = 2'-O-methyl modified nucleotide
  modified_base 90: mod_base = OTHER; note = 2'-O-methyl modified nucleotide
  modified_base 91: mod_base = OTHER; note = 2'-O-methyl modified nucleotide
  modified_base 92: mod_base = OTHER; note = 2'-O-methyl modified nucleotide
  modified_base 93: mod_base = OTHER; note = 2'-O-methyl modified nucleotide
  modified_base 94: mod_base = OTHER; note = 2'-O-methyl modified nucleotide
  modified_base 95: mod_base = OTHER; note = 2'-O-methyl modified nucleotide
  modified_base 96: mod_base = OTHER; note = 2'-O-methyl modified nucleotide
  modified_base 118: mod_base = OTHER; note = Nucleotide with phosphorothioate linkage
  modified_base 119: mod_base = OTHER; note = 2'-O-methyl modified nucleotide with phosphorothioate linkage
  modified_base 120: mod_base = OTHER; note = 2'-O-methyl modified nucleotide with phosphorothioate linkage
  modified_base 121: mod_base = OTHER; note = 2'-O-methyl modified nucleotide
gagaatcaaaatcggtgaatgttttagagctagaaatagcaagttaaaataaggctagtccgttatcaacttgaaaaagtggcaccgagtcggtgcctgcctatttgatgcaccgattttg

SEQ ID NO: 16352 - RNA, 120 nt, synthetic construct
  source 1..120: mol_type = other RNA
  modified_base 1: mod_base = OTHER; note = 2'-O-methyl modified nucleotide with phosphorothioate linkage
  modified_base 2: mod_base = OTHER; note = 2'-O-methyl modified nucleotide with phosphorothioate linkage
  modified_base 3: mod_base = OTHER; note = 2'-O-methyl modified nucleotide with phosphorothioate linkage
  modified_base 29: mod_base = OTHER; note = 2'-O-methyl modified nucleotide
  modified_base 30: mod_base = OTHER; note = 2'-O-methyl modified nucleotide
  modified_base 31: mod_base = OTHER; note = 2'-O-methyl modified nucleotide
  modified_base 32: mod_base = OTHER; note = 2'-O-methyl modified nucleotide
  modified_base 33: mod_base = OTHER; note = 2'-O-methyl modified nucleotide
  modified_base 34: mod_base = OTHER; note = 2'-O-methyl modified nucleotide
  modified_base 35: mod_base = OTHER; note = 2'-O-methyl modified nucleotide
  modified_base 36: mod_base = OTHER; note = 2'-O-methyl modified nucleotide
  modified_base 37: mod_base = OTHER; note = 2'-O-methyl modified nucleotide
  modified_base 38: mod_base = OTHER; note = 2'-O-methyl modified nucleotide
  modified_base 39: mod_base = OTHER; note = 2'-O-methyl modified nucleotide
  modified_base 40: mod_base = OTHER; note = 2'-O-methyl modified nucleotide
  modified_base 69: mod_base = OTHER; note = 2'-O-methyl modified nucleotide
  modified_base 70: mod_base = OTHER; note = 2'-O-methyl modified nucleotide
  modified_base 71: mod_base = OTHER; note = 2'-O-methyl modified nucleotide
  modified_base 72: mod_base = OTHER; note = 2'-O-methyl modified nucleotide
  modified_base 73: mod_base = OTHER; note = 2'-O-methyl modified nucleotide
  modified_base 74: mod_base = OTHER; note = 2'-O-methyl modified nucleotide
  modified_base 75: mod_base = OTHER; note = 2'-O-methyl modified nucleotide
  modified_base 76: mod_base = OTHER; note = 2'-O-methyl modified nucleotide
  modified_base 77: mod_base = OTHER; note = 2'-O-methyl modified nucleotide
  modified_base 78: mod_base = OTHER; note = 2'-O-methyl modified nucleotide
  modified_base 79: mod_base = OTHER; note = 2'-O-methyl modified nucleotide
  modified_base 80: mod_base = OTHER; note = 2'-O-methyl modified nucleotide
  modified_base 81: mod_base = OTHER; note = 2'-O-methyl modified nucleotide
  modified_base 82: mod_base = OTHER; note = 2'-O-methyl modified nucleotide
  modified_base 83: mod_base = OTHER; note = 2'-O-methyl modified nucleotide
  modified_base 84: mod_base = OTHER; note = 2'-O-methyl modified nucleotide
  modified_base 85: mod_base = OTHER; note = 2'-O-methyl modified nucleotide
  modified_base 86: mod_base = OTHER; note = 2'-O-methyl modified nucleotide
  modified_base 87: mod_base = OTHER; note = 2'-O-methyl modified nucleotide
  modified_base 88: mod_base = OTHER; note = 2'-O-methyl modified nucleotide
  modified_base 89: mod_base = OTHER; note = 2'-O-methyl modified nucleotide
  modified_base 90: mod_base = OTHER; note = 2'-O-methyl modified nucleotide
  modified_base 91: mod_base = OTHER; note = 2'-O-methyl modified nucleotide
  modified_base 92: mod_base = OTHER; note = 2'-O-methyl modified nucleotide
  modified_base 93: mod_base = OTHER; note = 2'-O-methyl modified nucleotide
  modified_base 94: mod_base = OTHER; note = 2'-O-methyl modified nucleotide
  modified_base 95: mod_base = OTHER; note = 2'-O-methyl modified nucleotide
  modified_base 96: mod_base = OTHER; note = 2'-O-methyl modified nucleotide
  modified_base 117: mod_base = OTHER; note = Nucleotide with phosphorothioate linkage
  modified_base 118: mod_base = OTHER; note = 2'-O-methyl modified nucleotide with phosphorothioate linkage
  modified_base 119: mod_base = OTHER; note = 2'-O-methyl modified nucleotide with phosphorothioate linkage
  modified_base 120: mod_base = OTHER; note = 2'-O-methyl modified nucleotide
gagaatcaaaatcggtgaatgttttagagctagaaatagcaagttaaaataaggctagtccgttatcaacttgaaaaagtggcaccgagtcggtgcctgcctatttgatgcaccgatttt

SEQ ID NO: 16353 - RNA, 119 nt, synthetic construct
  source 1..119: mol_type = other RNA
  modified_base 1: mod_base = OTHER; note = 2'-O-methyl modified nucleotide with phosphorothioate linkage
  modified_base 2: mod_base = OTHER; note = 2'-O-methyl modified nucleotide with phosphorothioate linkage
  modified_base 3: mod_base = OTHER; note = 2'-O-methyl modified nucleotide with phosphorothioate linkage
  modified_base 29: mod_base = OTHER; note = 2'-O-methyl modified nucleotide
  modified_base 30: mod_base = OTHER; note = 2'-O-methyl modified nucleotide
  modified_base 31: mod_base = OTHER; note = 2'-O-methyl modified nucleotide
  modified_base 32: mod_base = OTHER; note = 2'-O-methyl modified nucleotide
  modified_base 33: mod_base = OTHER; note = 2'-O-methyl modified nucleotide
  modified_base 34: mod_base = OTHER; note = 2'-O-methyl modified nucleotide
  modified_base 35: mod_base = OTHER; note = 2'-O-methyl modified nucleotide
  modified_base 36: mod_base = OTHER; note = 2'-O-methyl modified nucleotide
  modified_base 37: mod_base = OTHER; note = 2'-O-methyl modified nucleotide
  modified_base 38: mod_base = OTHER; note = 2'-O-methyl modified nucleotide
  modified_base 39: mod_base = OTHER; note = 2'-O-methyl modified nucleotide
  modified_base 40: mod_base = OTHER; note = 2'-O-methyl modified nucleotide
  modified_base 69: mod_base = OTHER; note = 2'-O-methyl modified nucleotide
  modified_base 70: mod_base = OTHER; note = 2'-O-methyl modified nucleotide
  modified_base 71: mod_base = OTHER; note = 2'-O-methyl modified nucleotide
  modified_base 72: mod_base = OTHER; note = 2'-O-methyl modified nucleotide
  modified_base 73: mod_base = OTHER; note = 2'-O-methyl modified nucleotide
  modified_base 74: mod_base = OTHER; note = 2'-O-methyl modified nucleotide
  modified_base 75: mod_base = OTHER; note = 2'-O-methyl modified nucleotide
  modified_base 76: mod_base = OTHER; note = 2'-O-methyl modified nucleotide
  modified_base 77: mod_base = OTHER; note = 2'-O-methyl modified nucleotide
  modified_base 78: mod_base = OTHER; note = 2'-O-methyl modified nucleotide
  modified_base 79: mod_base = OTHER; note = 2'-O-methyl modified nucleotide
  modified_base 80: mod_base = OTHER; note = 2'-O-methyl modified nucleotide
  modified_base 81: mod_base = OTHER; note = 2'-O-methyl modified nucleotide
  modified_base 82: mod_base = OTHER; note = 2'-O-methyl modified nucleotide
  modified_base 83: mod_base = OTHER; note = 2'-O-methyl modified nucleotide
  modified_base 84: mod_base = OTHER; note = 2'-O-methyl modified nucleotide
  modified_base 85: mod_base = OTHER; note = 2'-O-methyl modified nucleotide
  modified_base 86: mod_base = OTHER; note = 2'-O-methyl modified nucleotide
  modified_base 87: mod_base = OTHER; note = 2'-O-methyl modified nucleotide
  modified_base 88: mod_base = OTHER; note = 2'-O-methyl modified nucleotide
  modified_base 89: mod_base = OTHER; note = 2'-O-methyl modified nucleotide
  modified_base 90: mod_base = OTHER; note = 2'-O-methyl modified nucleotide
  modified_base 91: mod_base = OTHER; note = 2'-O-methyl modified nucleotide
  modified_base 92: mod_base = OTHER; note = 2'-O-methyl modified nucleotide
  modified_base 93: mod_base = OTHER; note = 2'-O-methyl modified nucleotide
  modified_base 94: mod_base = OTHER; note = 2'-O-methyl modified nucleotide
  modified_base 95: mod_base = OTHER; note = 2'-O-methyl modified nucleotide
  modified_base 96: mod_base = OTHER; note = 2'-O-methyl modified nucleotide
  modified_base 116: mod_base = OTHER; note = Nucleotide with phosphorothioate linkage
  modified_base 117: mod_base = OTHER; note = 2'-O-methyl modified nucleotide with phosphorothioate linkage
  modified_base 118: mod_base = OTHER; note = 2'-O-methyl modified nucleotide with phosphorothioate linkage
  modified_base 119: mod_base = OTHER; note = 2'-O-methyl modified nucleotide
gagaatcaaaatcggtgaatgttttagagctagaaatagcaagttaaaataaggctagtccgttatcaacttgaaaaagtggcaccgagtcggtgcctgcctatttgatgcaccgattt

SEQ ID NO: 16354 - RNA, 118 nt, synthetic construct
  source 1..118: mol_type = other RNA
  modified_base 1: mod_base = OTHER; note = 2'-O-methyl modified nucleotide with phosphorothioate linkage
  modified_base 2: mod_base = OTHER; note = 2'-O-methyl modified nucleotide with phosphorothioate linkage
  modified_base 3: mod_base = OTHER; note = 2'-O-methyl modified nucleotide with phosphorothioate linkage
  modified_base 29: mod_base = OTHER; note = 2'-O-methyl modified nucleotide
  modified_base 30: mod_base = OTHER; note = 2'-O-methyl modified nucleotide
  modified_base 31: mod_base = OTHER; note = 2'-O-methyl modified nucleotide
  modified_base 32: mod_base = OTHER; note = 2'-O-methyl modified nucleotide
  modified_base 33: mod_base = OTHER; note = 2'-O-methyl modified nucleotide
  modified_base 34: mod_base = OTHER; note = 2'-O-methyl modified nucleotide
  modified_base 35: mod_base = OTHER; note = 2'-O-methyl modified nucleotide
  modified_base 36: mod_base = OTHER; note = 2'-O-methyl modified nucleotide
  modified_base 37: mod_base = OTHER; note = 2'-O-methyl modified nucleotide
  modified_base 38: mod_base = OTHER; note = 2'-O-methyl modified nucleotide
  modified_base 39: mod_base = OTHER; note = 2'-O-methyl modified nucleotide
  modified_base 40: mod_base = OTHER; note = 2'-O-methyl modified nucleotide
  modified_base 69: mod_base = OTHER; note = 2'-O-methyl modified nucleotide
  modified_base 70: mod_base = OTHER; note = 2'-O-methyl modified nucleotide
  modified_base 71: mod_base = OTHER; note = 2'-O-methyl modified nucleotide
  modified_base 72: mod_base = OTHER; note = 2'-O-methyl modified nucleotide
  modified_base 73: mod_base = OTHER; note = 2'-O-methyl modified nucleotide
  modified_base 74: mod_base = OTHER; note = 2'-O-methyl modified nucleotide
  modified_base 75: mod_base = OTHER; note = 2'-O-methyl modified nucleotide
  modified_base 76: mod_base = OTHER; note = 2'-O-methyl modified nucleotide
  modified_base 77: mod_base = OTHER; note = 2'-O-methyl modified nucleotide
  modified_base 78: mod_base = OTHER; note = 2'-O-methyl modified nucleotide
  modified_base 79: mod_base = OTHER; note = 2'-O-methyl modified nucleotide
  modified_base 80: mod_base = OTHER; note = 2'-O-methyl modified nucleotide
  modified_base 81: mod_base = OTHER; note = 2'-O-methyl modified nucleotide
  modified_base 82: mod_base = OTHER; note = 2'-O-methyl modified nucleotide
  modified_base 83: mod_base = OTHER; note = 2'-O-methyl modified nucleotide
  modified_base 84: mod_base = OTHER; note = 2'-O-methyl modified nucleotide
  modified_base 85: mod_base = OTHER; note = 2'-O-methyl modified nucleotide
  modified_base 86: mod_base = OTHER; note = 2'-O-methyl modified nucleotide
  modified_base 87: mod_base = OTHER; note = 2'-O-methyl modified nucleotide
  modified_base 88: mod_base = OTHER; note = 2'-O-methyl modified nucleotide
  modified_base 89: mod_base = OTHER; note = 2'-O-methyl modified nucleotide
  modified_base 90: mod_base = OTHER; note = 2'-O-methyl modified nucleotide
  modified_base 91: mod_base = OTHER; note = 2'-O-methyl modified nucleotide
  modified_base 92: mod_base = OTHER; note = 2'-O-methyl modified nucleotide
  modified_base 93: mod_base = OTHER; note = 2'-O-methyl modified nucleotide
  modified_base 94: mod_base = OTHER; note = 2'-O-methyl modified nucleotide
  modified_base 95: mod_base = OTHER; note = 2'-O-methyl modified nucleotide
  modified_base 96: mod_base = OTHER; note = 2'-O-methyl modified nucleotide
  modified_base 115: mod_base = OTHER; note = Nucleotide with phosphorothioate linkage
  modified_base 116: mod_base = OTHER; note = 2'-O-methyl modified nucleotide with phosphorothioate linkage
  modified_base 117: mod_base = OTHER; note = 2'-O-methyl modified nucleotide with phosphorothioate linkage
  modified_base 118: mod_base = OTHER; note = 2'-O-methyl modified nucleotide
gagaatcaaaatcggtgaatgttttagagctagaaatagcaagttaaaataaggctagtccgttatcaacttgaaaaagtggcaccgagtcggtgcctgcctatttgatgcaccgatt

SEQ ID NO: 16355 - RNA, 125 nt, synthetic construct
  source 1..125: mol_type = other RNA
  modified_base 1: mod_base = OTHER; note = 2'-O-methyl modified nucleotide with phosphorothioate linkage
  modified_base 2: mod_base = OTHER; note = 2'-O-methyl modified nucleotide with phosphorothioate linkage
  modified_base 3: mod_base = OTHER; note = 2'-O-methyl modified nucleotide with phosphorothioate linkage
  modified_base 29: mod_base = OTHER; note = 2'-O-methyl modified nucleotide
  modified_base 30: mod_base = OTHER; note = 2'-O-methyl modified nucleotide
  modified_base 31: mod_base = OTHER; note = 2'-O-methyl modified nucleotide
  modified_base 32: mod_base = OTHER; note = 2'-O-methyl modified nucleotide
  modified_base 33: mod_base = OTHER; note = 2'-O-methyl modified nucleotide
  modified_base 34: mod_base = OTHER; note = 2'-O-methyl modified nucleotide
  modified_base 35: mod_base = OTHER; note = 2'-O-methyl modified nucleotide
  modified_base 36: mod_base = OTHER; note = 2'-O-methyl modified nucleotide
  modified_base 37: mod_base = OTHER; note = 2'-O-methyl modified nucleotide
  modified_base 38: mod_base = OTHER; note = 2'-O-methyl modified nucleotide
  modified_base 39: mod_base = OTHER; note = 2'-O-methyl modified nucleotide
  modified_base 40: mod_base = OTHER; note = 2'-O-methyl modified nucleotide
  modified_base 69: mod_base = OTHER; note = 2'-O-methyl modified nucleotide
  modified_base 70: mod_base = OTHER; note = 2'-O-methyl modified nucleotide
  modified_base 71: mod_base = OTHER; note = 2'-O-methyl modified nucleotide
  modified_base 72: mod_base = OTHER; note = 2'-O-methyl modified nucleotide
  modified_base 73: mod_base = OTHER; note = 2'-O-methyl modified nucleotide
  modified_base 74: mod_base = OTHER; note = 2'-O-methyl modified nucleotide
  modified_base 75: mod_base = OTHER; note = 2'-O-methyl modified nucleotide
  modified_base 76: mod_base = OTHER; note = 2'-O-methyl modified nucleotide
  modified_base 77: mod_base = OTHER; note = 2'-O-methyl modified nucleotide
  modified_base 78: mod_base = OTHER; note = 2'-O-methyl modified nucleotide
  modified_base 79: mod_base = OTHER; note = 2'-O-methyl modified nucleotide
  modified_base 80: mod_base = OTHER; note = 2'-O-methyl modified nucleotide
  modified_base 81: mod_base = OTHER; note = 2'-O-methyl modified nucleotide
  modified_base 82: mod_base = OTHER; note = 2'-O-methyl modified nucleotide
  modified_base 83: mod_base = OTHER; note = 2'-O-methyl modified nucleotide
  modified_base 84: mod_base = OTHER; note = 2'-O-methyl modified nucleotide
  modified_base 85: mod_base = OTHER; note = 2'-O-methyl modified nucleotide
  modified_base 86: mod_base = OTHER; note = 2'-O-methyl modified nucleotide
  modified_base 87: mod_base = OTHER; note = 2'-O-methyl modified nucleotide
  modified_base 88: mod_base = OTHER; note = 2'-O-methyl modified nucleotide
  modified_base 89: mod_base = OTHER; note = 2'-O-methyl modified nucleotide
  modified_base 90: mod_base = OTHER; note = 2'-O-methyl modified nucleotide
  modified_base 91: mod_base = OTHER; note = 2'-O-methyl modified nucleotide
  modified_base 92: mod_base = OTHER; note = 2'-O-methyl modified nucleotide
  modified_base 93: mod_base = OTHER; note = 2'-O-methyl modified nucleotide
  modified_base 94: mod_base = OTHER; note = 2'-O-methyl modified nucleotide
  modified_base 95: mod_base = OTHER; note = 2'-O-methyl modified nucleotide
  modified_base 96: mod_base = OTHER; note = 2'-O-methyl modified nucleotide
  modified_base 122: mod_base = OTHER; note = Nucleotide with phosphorothioate linkage
  modified_base 123: mod_base = OTHER; note = 2'-O-methyl modified nucleotide with phosphorothioate linkage
  modified_base 124: mod_base = OTHER; note = 2'-O-methyl modified nucleotide with phosphorothioate linkage
  modified_base 125: mod_base = OTHER; note = 2'-O-methyl modified nucleotide
gagaatcaaaatcggtgaatgttttagagctagaaatagcaagttaaaataaggctagtccgttatcaacttgaaaaagtggcaccgagtcggtgcgtctgcctatttgatgcaccgattttgat

SEQ ID NO: 16356 - RNA, 124 nt, synthetic construct
  source 1..124: mol_type = other RNA
  modified_base 1: mod_base = OTHER; note = 2'-O-methyl modified nucleotide with phosphorothioate linkage
  modified_base 2: mod_base = OTHER; note = 2'-O-methyl modified nucleotide with phosphorothioate linkage
  modified_base 3: mod_base = OTHER; note = 2'-O-methyl modified nucleotide with phosphorothioate linkage
  modified_base 29: mod_base = OTHER; note = 2'-O-methyl modified nucleotide
  modified_base 30: mod_base = OTHER; note = 2'-O-methyl modified nucleotide
  modified_base 31: mod_base = OTHER; note = 2'-O-methyl modified nucleotide
  modified_base 32: mod_base = OTHER; note = 2'-O-methyl modified nucleotide
  modified_base 33: mod_base = OTHER; note = 2'-O-methyl modified nucleotide
  modified_base 34: mod_base = OTHER; note = 2'-O-methyl modified nucleotide
  modified_base 35: mod_base = OTHER; note = 2'-O-methyl modified nucleotide
  modified_base 36: mod_base = OTHER; note = 2'-O-methyl modified nucleotide
  modified_base 37: mod_base = OTHER; note = 2'-O-methyl modified nucleotide
  modified_base 38: mod_base = OTHER; note = 2'-O-methyl modified nucleotide
  modified_base 39: mod_base = OTHER; note = 2'-O-methyl modified nucleotide
  modified_base 40: mod_base = OTHER; note = 2'-O-methyl modified nucleotide
  modified_base 69: mod_base = OTHER; note = 2'-O-methyl modified nucleotide
  modified_base 70: mod_base = OTHER; note = 2'-O-methyl modified nucleotide
  modified_base 71: mod_base = OTHER; note = 2'-O-methyl modified nucleotide
  modified_base 72: mod_base = OTHER; note = 2'-O-methyl modified nucleotide
  modified_base 73: mod_base = OTHER; note = 2'-O-methyl modified nucleotide
  modified_base 74: mod_base = OTHER; note = 2'-O-methyl modified nucleotide
  modified_base 75: mod_base = OTHER; note = 2'-O-methyl modified nucleotide
  modified_base 76: mod_base = OTHER; note = 2'-O-methyl modified nucleotide
  modified_base 77: mod_base = OTHER; note = 2'-O-methyl modified nucleotide
  modified_base 78: mod_base = OTHER; note = 2'-O-methyl modified nucleotide
  modified_base 79: mod_base = OTHER; note = 2'-O-methyl modified nucleotide
  modified_base 80: mod_base = OTHER; note = 2'-O-methyl modified nucleotide
  modified_base 81: mod_base = OTHER; note = 2'-O-methyl modified nucleotide
  modified_base 82: mod_base = OTHER; note = 2'-O-methyl modified nucleotide
  modified_base 83: mod_base = OTHER; note = 2'-O-methyl modified nucleotide
  modified_base 84: mod_base = OTHER; note = 2'-O-methyl modified nucleotide
  modified_base 85: mod_base = OTHER; note = 2'-O-methyl modified nucleotide
  modified_base 86: mod_base = OTHER; note = 2'-O-methyl modified nucleotide
  modified_base 87: mod_base = OTHER; note = 2'-O-methyl modified nucleotide
  modified_base 88: mod_base = OTHER; note = 2'-O-methyl modified nucleotide
  modified_base 89: mod_base = OTHER; note = 2'-O-methyl modified nucleotide
  modified_base 90: mod_base = OTHER; note = 2'-O-methyl modified nucleotide
  modified_base 91: mod_base = OTHER; note = 2'-O-methyl modified nucleotide
  modified_base 92: mod_base = OTHER; note = 2'-O-methyl modified nucleotide
  modified_base 93: mod_base = OTHER; note = 2'-O-methyl modified nucleotide
  modified_base 94: mod_base = OTHER; note = 2'-O-methyl modified nucleotide
  modified_base 95: mod_base = OTHER; note = 2'-O-methyl modified nucleotide
  modified_base 96: mod_base = OTHER; note = 2'-O-methyl modified nucleotide
  modified_base 121: mod_base = OTHER; note = Nucleotide with phosphorothioate linkage
  modified_base 122: mod_base = OTHER; note = 2'-O-methyl modified nucleotide with phosphorothioate linkage
  modified_base 123: mod_base = OTHER; note = 2'-O-methyl modified nucleotide with phosphorothioate linkage
  modified_base 124: mod_base = OTHER; note = 2'-O-methyl modified nucleotide
gagaatcaaaatcggtgaatgttttagagctagaaatagcaagttaaaataaggctagtccgttatcaacttgaaaaagtggcaccgagtcggtgcgtctgcctatttgatgcaccgattttga

SEQ ID NO: 16357 - RNA, 123 nt, synthetic construct
  source 1..123: mol_type = other RNA
  modified_base 1: mod_base = OTHER; note = 2'-O-methyl modified nucleotide with phosphorothioate linkage
  modified_base 2: mod_base = OTHER; note = 2'-O-methyl modified nucleotide with phosphorothioate linkage
  modified_base 3: mod_base = OTHER; note = 2'-O-methyl modified nucleotide with phosphorothioate linkage
  modified_base 29: mod_base = OTHER; note = 2'-O-methyl modified nucleotide
  modified_base 30: mod_base = OTHER; note = 2'-O-methyl modified nucleotide
  modified_base 31: mod_base = OTHER; note = 2'-O-methyl modified nucleotide
  modified_base 32: mod_base = OTHER; note = 2'-O-methyl modified nucleotide
  modified_base 33: mod_base = OTHER; note = 2'-O-methyl modified nucleotide
  modified_base 34: mod_base = OTHER; note = 2'-O-methyl modified nucleotide
  modified_base 35: mod_base = OTHER; note = 2'-O-methyl modified nucleotide
  modified_base 36: mod_base = OTHER; note = 2'-O-methyl modified nucleotide
  modified_base 37: mod_base = OTHER; note = 2'-O-methyl modified nucleotide
  modified_base 38: mod_base = OTHER; note = 2'-O-methyl modified nucleotide
  modified_base 39: mod_base = OTHER; note = 2'-O-methyl modified nucleotide
  modified_base 40: mod_base = OTHER; note = 2'-O-methyl modified nucleotide
  modified_base 69: mod_base = OTHER; note = 2'-O-methyl modified nucleotide
  modified_base 70: mod_base = OTHER; note = 2'-O-methyl modified nucleotide
  modified_base 71: mod_base = OTHER; note = 2'-O-methyl modified nucleotide
  modified_base 72: mod_base = OTHER; note = 2'-O-methyl modified nucleotide
  modified_base 73: mod_base = OTHER; note = 2'-O-methyl modified nucleotide
  modified_base 74: mod_base = OTHER; note = 2'-O-methyl modified nucleotide
  modified_base 75: mod_base = OTHER; note = 2'-O-methyl modified nucleotide
  modified_base 76: mod_base = OTHER; note = 2'-O-methyl modified nucleotide
  modified_base 77: mod_base = OTHER; note = 2'-O-methyl modified nucleotide
  modified_base 78: mod_base = OTHER; note = 2'-O-methyl modified nucleotide
  modified_base 79: mod_base = OTHER; note = 2'-O-methyl modified nucleotide
  modified_base 80: mod_base = OTHER; note = 2'-O-methyl modified nucleotide
  modified_base 81: mod_base = OTHER; note = 2'-O-methyl modified nucleotide
  modified_base 82: mod_base = OTHER; note = 2'-O-methyl modified nucleotide
  modified_base 83: mod_base = OTHER; note = 2'-O-methyl modified nucleotide
  modified_base 84: mod_base = OTHER; note = 2'-O-methyl modified nucleotide
  modified_base 85: mod_base = OTHER; note = 2'-O-methyl modified nucleotide
  modified_base 86: mod_base = OTHER; note = 2'-O-methyl modified nucleotide
  modified_base 87: mod_base = OTHER; note = 2'-O-methyl modified nucleotide
  modified_base 88: mod_base = OTHER; note = 2'-O-methyl modified nucleotide
  modified_base 89: mod_base = OTHER; note = 2'-O-methyl modified nucleotide
  modified_base 90: mod_base = OTHER; note = 2'-O-methyl modified nucleotide
  modified_base 91: mod_base = OTHER; note = 2'-O-methyl modified nucleotide
  modified_base 92: mod_base = OTHER; note = 2'-O-methyl modified nucleotide
  modified_base 93: mod_base = OTHER; note = 2'-O-methyl modified nucleotide
  modified_base 94: mod_base = OTHER; note = 2'-O-methyl modified nucleotide
  modified_base 95: mod_base = OTHER; note = 2'-O-methyl modified nucleotide
  modified_base 96: mod_base = OTHER; note = 2'-O-methyl modified nucleotide
  modified_base 120: mod_base = OTHER; note = Nucleotide with phosphorothioate linkage
  modified_base 121: mod_base = OTHER; note = 2'-O-methyl modified nucleotide with phosphorothioate linkage
  modified_base 122: mod_base = OTHER; note = 2'-O-methyl modified nucleotide with phosphorothioate linkage
  modified_base 123: mod_base = OTHER; note = 2'-O-methyl modified nucleotide
gagaatcaaaatcggtgaatgttttagagctagaaatagcaagttaaaataaggctagtccgttatcaacttgaaaaagtggcaccgagtcggtgcgtctgcctatttgatgcaccgattttg

SEQ ID NO: 16358 - RNA, 122 nt, synthetic construct
  source 1..122: mol_type = other RNA
  modified_base 1: mod_base = OTHER; note = 2'-O-methyl modified nucleotide with phosphorothioate linkage
  modified_base 2: mod_base = OTHER; note = 2'-O-methyl modified nucleotide with phosphorothioate linkage
  modified_base 3: mod_base = OTHER; note = 2'-O-methyl modified nucleotide with phosphorothioate linkage
  modified_base 29: mod_base = OTHER; note = 2'-O-methyl modified nucleotide
  modified_base 30: mod_base = OTHER; note = 2'-O-methyl modified nucleotide
  modified_base 31: mod_base = OTHER; note = 2'-O-methyl modified nucleotide
  modified_base 32: mod_base = OTHER; note = 2'-O-methyl modified nucleotide
  modified_base 33: mod_base = OTHER; note = 2'-O-methyl modified nucleotide
  modified_base 34: mod_base = OTHER; note = 2'-O-methyl modified nucleotide
  modified_base 35: mod_base = OTHER; note = 2'-O-methyl modified nucleotide
  modified_base 36: mod_base = OTHER; note = 2'-O-methyl modified nucleotide
  modified_base 37: mod_base = OTHER; note = 2'-O-methyl modified nucleotide
  modified_base 38: mod_base = OTHER; note = 2'-O-methyl modified nucleotide
  modified_base 39: mod_base = OTHER; note = 2'-O-methyl modified nucleotide
  modified_base 40: mod_base = OTHER; note = 2'-O-methyl modified nucleotide
  modified_base 69: mod_base = OTHER; note = 2'-O-methyl modified nucleotide
  modified_base 70: mod_base = OTHER; note = 2'-O-methyl modified nucleotide
  modified_base 71: mod_base = OTHER; note = 2'-O-methyl modified nucleotide
  modified_base 72: mod_base = OTHER; note = 2'-O-methyl modified nucleotide
  modified_base 73: mod_base = OTHER; note = 2'-O-methyl modified nucleotide
  modified_base 74: mod_base = OTHER; note = 2'-O-methyl modified nucleotide
  modified_base 75: mod_base = OTHER; note = 2'-O-methyl modified nucleotide
  modified_base 76: mod_base = OTHER; note = 2'-O-methyl modified nucleotide
  modified_base 77: mod_base = OTHER; note = 2'-O-methyl modified nucleotide
  modified_base 78: mod_base = OTHER; note = 2'-O-methyl modified nucleotide
  modified_base 79: mod_base = OTHER; note = 2'-O-methyl modified nucleotide
  modified_base 80: mod_base = OTHER; note = 2'-O-methyl modified nucleotide
  modified_base 81: mod_base = OTHER; note = 2'-O-methyl modified nucleotide
  modified_base 82: mod_base = OTHER; note = 2'-O-methyl modified nucleotide
  modified_base 83: mod_base = OTHER; note = 2'-O-methyl modified nucleotide
  modified_base 84: mod_base = OTHER; note = 2'-O-methyl modified nucleotide
  modified_base 85: mod_base = OTHER; note = 2'-O-methyl modified nucleotide
  modified_base 86: mod_base = OTHER; note = 2'-O-methyl modified nucleotide
  modified_base 87: mod_base = OTHER; note = 2'-O-methyl modified nucleotide
  modified_base 88: mod_base = OTHER; note = 2'-O-methyl modified nucleotide
  modified_base 89: mod_base = OTHER; note = 2'-O-methyl modified nucleotide
  modified_base 90: mod_base = OTHER; note = 2'-O-methyl modified nucleotide
  modified_base 91: mod_base = OTHER; note = 2'-O-methyl modified nucleotide
  modified_base 92: mod_base = OTHER; note = 2'-O-methyl modified nucleotide
  modified_base 93: mod_base = OTHER; note = 2'-O-methyl modified nucleotide
  modified_base 94: mod_base = OTHER; note = 2'-O-methyl modified nucleotide
  modified_base 95: mod_base = OTHER; note = 2'-O-methyl modified nucleotide
  modified_base 96: mod_base = OTHER; note = 2'-O-methyl modified nucleotide
  modified_base 119: mod_base = OTHER; note = Nucleotide with phosphorothioate linkage
  modified_base 120: mod_base = OTHER; note = 2'-O-methyl modified nucleotide with phosphorothioate linkage
  modified_base 121: mod_base = OTHER; note = 2'-O-methyl modified nucleotide with phosphorothioate linkage
  modified_base 122: mod_base = OTHER; note = 2'-O-methyl modified nucleotide
gagaatcaaaatcggtgaatgttttagagctagaaatagcaagttaaaataaggctagtccgttatcaacttgaaaaagtggcaccgagtcggtgcgtctgcctatttgatgcaccgatttt

SEQ ID NO: 16359 - RNA, 121 nt, synthetic construct
  source 1..121: mol_type = other RNA
  modified_base 1: mod_base = OTHER; note = 2'-O-methyl modified nucleotide with phosphorothioate linkage
  modified_base 2: mod_base = OTHER; note = 2'-O-methyl modified nucleotide with phosphorothioate linkage
  modified_base 3: mod_base = OTHER; note = 2'-O-methyl modified nucleotide with phosphorothioate linkage
  modified_base 29: mod_base = OTHER; note = 2'-O-methyl modified nucleotide
  modified_base 30: mod_base = OTHER; note = 2'-O-methyl modified nucleotide
  modified_base 31: mod_base = OTHER; note = 2'-O-methyl modified nucleotide
  modified_base 32: mod_base = OTHER; note = 2'-O-methyl modified nucleotide
  modified_base 33: mod_base = OTHER; note = 2'-O-methyl modified nucleotide
  modified_base 34: mod_base = OTHER; note = 2'-O-methyl modified nucleotide
  modified_base 35: mod_base = OTHER; note = 2'-O-methyl modified nucleotide
  modified_base 36: mod_base = OTHER; note = 2'-O-methyl modified nucleotide
  modified_base 37: mod_base = OTHER; note = 2'-O-methyl modified nucleotide
  modified_base 38: mod_base = OTHER; note = 2'-O-methyl modified nucleotide
  modified_base 39: mod_base = OTHER; note = 2'-O-methyl modified nucleotide
  modified_base 40: mod_base = OTHER; note = 2'-O-methyl modified nucleotide
  modified_base 69: mod_base = OTHER; note = 2'-O-methyl modified nucleotide
  modified_base 70: mod_base = OTHER; note = 2'-O-methyl modified nucleotide
  modified_base 71: mod_base = OTHER; note = 2'-O-methyl modified nucleotide
  modified_base 72: mod_base = OTHER; note = 2'-O-methyl modified nucleotide
  modified_base 73: mod_base = OTHER; note = 2'-O-methyl modified nucleotide
  modified_base 74: mod_base = OTHER; note = 2'-O-methyl modified nucleotide
  modified_base 75: mod_base = OTHER; note = 2'-O-methyl modified nucleotide
  modified_base 76: mod_base = OTHER; note = 2'-O-methyl modified nucleotide
  modified_base 77: mod_base = OTHER; note = 2'-O-methyl modified nucleotide
  modified_base 78: mod_base = OTHER; note = 2'-O-methyl modified nucleotide
  modified_base 79: mod_base = OTHER; note = 2'-O-methyl modified nucleotide
  modified_base 80: mod_base = OTHER; note = 2'-O-methyl modified nucleotide
  modified_base 81: mod_base = OTHER; note = 2'-O-methyl modified nucleotide
  modified_base 82: mod_base = OTHER; note = 2'-O-methyl modified nucleotide
  modified_base 83: mod_base = OTHER; note = 2'-O-methyl modified nucleotide
  modified_base 84: mod_base = OTHER; note = 2'-O-methyl modified nucleotide
  modified_base 85: mod_base = OTHER; note = 2'-O-methyl modified nucleotide
  modified_base 86: mod_base = OTHER; note = 2'-O-methyl modified nucleotide
  modified_base 87: mod_base = OTHER; note = 2'-O-methyl modified nucleotide
  modified_base 88: mod_base = OTHER; note = 2'-O-methyl modified nucleotide
  modified_base 89: mod_base = OTHER; note = 2'-O-methyl modified nucleotide
  modified_base 90: mod_base = OTHER; note = 2'-O-methyl modified nucleotide
  modified_base 91: mod_base = OTHER; note = 2'-O-methyl modified nucleotide
  modified_base 92: mod_base = OTHER; note = 2'-O-methyl modified nucleotide
  modified_base 93: mod_base = OTHER; note = 2'-O-methyl modified nucleotide
  modified_base 94: mod_base = OTHER; note = 2'-O-methyl modified nucleotide
  modified_base 95: mod_base = OTHER; note = 2'-O-methyl modified nucleotide
  modified_base 96: mod_base = OTHER; note = 2'-O-methyl modified nucleotide
  modified_base 118: mod_base = OTHER; note = Nucleotide with phosphorothioate linkage
  modified_base 119: mod_base = OTHER; note = 2'-O-methyl modified nucleotide with phosphorothioate linkage
  modified_base 120: mod_base = OTHER; note = 2'-O-methyl modified nucleotide with phosphorothioate linkage
  modified_base 121: mod_base = OTHER; note = 2'-O-methyl modified nucleotide
gagaatcaaaatcggtgaatgttttagagctagaaatagcaagttaaaataaggctagtccgttatcaacttgaaaaagtggcaccgagtcggtgcgtctgcctatttgatgcaccgattt

SEQ ID NO: 16360 - RNA, 120 nt, synthetic construct
  source 1..120: mol_type = other RNA
  modified_base 1: mod_base = OTHER; note = 2'-O-methyl modified nucleotide with phosphorothioate linkage
  modified_base 2: mod_base = OTHER; note = 2'-O-methyl modified nucleotide with phosphorothioate linkage
  modified_base 3: mod_base = OTHER; note = 2'-O-methyl modified nucleotide with phosphorothioate linkage
  modified_base 29: mod_base = OTHER; note = 2'-O-methyl modified nucleotide
  modified_base 30: mod_base = OTHER; note = 2'-O-methyl modified nucleotide
  modified_base 31: mod_base = OTHER; note = 2'-O-methyl modified nucleotide
  modified_base 32: mod_base = OTHER; note = 2'-O-methyl modified nucleotide
  modified_base 33: mod_base = OTHER; note = 2'-O-methyl modified nucleotide
  modified_base 34: mod_base = OTHER; note = 2'-O-methyl modified nucleotide
  modified_base 35: mod_base = OTHER; note = 2'-O-methyl modified nucleotide
  modified_base 36: mod_base = OTHER; note = 2'-O-methyl modified nucleotide
  modified_base 37: mod_base = OTHER; note = 2'-O-methyl modified nucleotide
  modified_base 38: mod_base = OTHER; note = 2'-O-methyl modified nucleotide
  modified_base 39: mod_base = OTHER; note = 2'-O-methyl modified nucleotide
  modified_base 40: mod_base = OTHER; note = 2'-O-methyl modified nucleotide
  modified_base 69: mod_base = OTHER; note = 2'-O-methyl modified nucleotide
  modified_base 70: mod_base = OTHER; note = 2'-O-methyl modified nucleotide
  modified_base 71: mod_base = OTHER; note = 2'-O-methyl modified nucleotide
  modified_base 72: mod_base = OTHER; note = 2'-O-methyl modified nucleotide
  modified_base 73: mod_base = OTHER; note = 2'-O-methyl modified nucleotide
  modified_base 74: mod_base = OTHER; note = 2'-O-methyl modified nucleotide
  modified_base 75: mod_base = OTHER; note = 2'-O-methyl modified nucleotide
  modified_base 76: mod_base = OTHER; note = 2'-O-methyl modified nucleotide
  modified_base 77: mod_base = OTHER; note = 2'-O-methyl modified nucleotide
  modified_base 78: mod_base = OTHER; note = 2'-O-methyl modified nucleotide
  modified_base 79: mod_base = OTHER; note = 2'-O-methyl modified nucleotide
  modified_base 80: mod_base = OTHER; note = 2'-O-methyl modified nucleotide
  modified_base 81: mod_base = OTHER; note = 2'-O-methyl modified nucleotide
  modified_base 82: mod_base = OTHER; note = 2'-O-methyl modified nucleotide
  modified_base 83: mod_base = OTHER; note = 2'-O-methyl modified nucleotide
  modified_base 84: mod_base = OTHER; note = 2'-O-methyl modified nucleotide
  modified_base 85: mod_base = OTHER; note = 2'-O-methyl modified nucleotide
  modified_base 86: mod_base = OTHER; note = 2'-O-methyl modified nucleotide
  modified_base 87: mod_base = OTHER; note = 2'-O-methyl modified nucleotide
  modified_base 88: mod_base = OTHER; note = 2'-O-methyl modified nucleotide
  modified_base 89: mod_base = OTHER; note = 2'-O-methyl modified nucleotide
  modified_base 90: mod_base = OTHER; note = 2'-O-methyl modified nucleotide
  modified_base 91: mod_base = OTHER; note = 2'-O-methyl modified nucleotide
  modified_base 92: mod_base = OTHER; note = 2'-O-methyl modified nucleotide
  modified_base 93: mod_base = OTHER; note = 2'-O-methyl modified nucleotide
  modified_base 94: mod_base = OTHER; note = 2'-O-methyl modified nucleotide
  modified_base 95: mod_base = OTHER; note = 2'-O-methyl modified nucleotide
  modified_base 96: mod_base = OTHER; note = 2'-O-methyl modified nucleotide
  modified_base 117: mod_base = OTHER; note = Nucleotide with phosphorothioate linkage
  modified_base 118: mod_base = OTHER; note = 2'-O-methyl modified nucleotide with phosphorothioate linkage
  modified_base 119: mod_base = OTHER; note = 2'-O-methyl modified nucleotide with phosphorothioate linkage
  modified_base 120: mod_base = OTHER; note = 2'-O-methyl modified nucleotide
gagaatcaaaatcggtgaatgttttagagctagaaatagcaagttaaaataaggctagtccgttatcaacttgaaaaagtggcaccgagtcggtgcgtctgcctatttgatgcaccgatt

SEQ ID NO: 16361 - RNA, 127 nt, synthetic construct
  source 1..127: mol_type = other RNA
  modified_base 1: mod_base = OTHER; note = 2'-O-methyl modified nucleotide with phosphorothioate linkage
  modified_base 2: mod_base = OTHER; note = 2'-O-methyl modified nucleotide with phosphorothioate linkage
  modified_base 3: mod_base = OTHER; note = 2'-O-methyl modified nucleotide with phosphorothioate linkage
  modified_base 29: mod_base = OTHER; note = 2'-O-methyl modified nucleotide
  modified_base 30: mod_base = OTHER; note = 2'-O-methyl modified nucleotide
  modified_base 31: mod_base = OTHER; note = 2'-O-methyl modified nucleotide
  modified_base 32: mod_base = OTHER; note = 2'-O-methyl modified nucleotide
  modified_base 33: mod_base = OTHER; note = 2'-O-methyl modified nucleotide
  modified_base 34: mod_base = OTHER; note = 2'-O-methyl modified nucleotide
  modified_base 35: mod_base = OTHER; note = 2'-O-methyl modified nucleotide
  modified_base 36: mod_base = OTHER; note = 2'-O-methyl modified nucleotide
  modified_base 37: mod_base = OTHER; note = 2'-O-methyl modified nucleotide
  modified_base 38: mod_base = OTHER; note = 2'-O-methyl modified nucleotide
  modified_base 39: mod_base = OTHER; note = 2'-O-methyl modified nucleotide
  modified_base 40: mod_base = OTHER; note = 2'-O-methyl modified nucleotide
  modified_base 69: mod_base = OTHER; note = 2'-O-methyl modified nucleotide
  modified_base 70: mod_base = OTHER; note = 2'-O-methyl modified nucleotide
  modified_base 71: mod_base = OTHER; note = 2'-O-methyl modified nucleotide
  modified_base 72: mod_base = OTHER; note = 2'-O-methyl modified nucleotide
  modified_base 73: mod_base = OTHER; note = 2'-O-methyl modified nucleotide
  modified_base 74: mod_base = OTHER; note = 2'-O-methyl modified nucleotide
  modified_base 75: mod_base = OTHER; note = 2'-O-methyl modified nucleotide
  modified_base 76: mod_base = OTHER; note = 2'-O-methyl modified nucleotide
  modified_base 77: mod_base = OTHER; note = 2'-O-methyl modified nucleotide
  modified_base 78: mod_base = OTHER; note = 2'-O-methyl modified nucleotide
  modified_base 79: mod_base = OTHER; note = 2'-O-methyl modified nucleotide
  modified_base 80: mod_base = OTHER; note = 2'-O-methyl modified nucleotide
  modified_base 81: mod_base = OTHER; note = 2'-O-methyl modified nucleotide
  modified_base 82: mod_base = OTHER; note = 2'-O-methyl modified nucleotide
  modified_base 83: mod_base = OTHER; note = 2'-O-methyl modified nucleotide
  modified_base 84: mod_base = OTHER; note = 2'-O-methyl modified nucleotide
  modified_base 85: mod_base = OTHER; note = 2'-O-methyl modified nucleotide
  modified_base 86: mod_base = OTHER; note = 2'-O-methyl modified nucleotide
  modified_base 87: mod_base = OTHER; note = 2'-O-methyl modified nucleotide
  modified_base 88: mod_base = OTHER; note = 2'-O-methyl modified nucleotide
  modified_base 89: mod_base = OTHER; note = 2'-O-methyl modified nucleotide
  modified_base 90: mod_base = OTHER; note = 2'-O-methyl modified nucleotide
  modified_base 91: mod_base = OTHER; note = 2'-O-methyl modified nucleotide
  modified_base 92: mod_base = OTHER; note = 2'-O-methyl modified nucleotide
  modified_base 93: mod_base = OTHER; note = 2'-O-methyl modified nucleotide
  modified_base 94: mod_base = OTHER; note = 2'-O-methyl modified nucleotide
  modified_base 95: mod_base = OTHER; note = 2'-O-methyl modified nucleotide
  modified_base 96: mod_base = OTHER; note = 2'-O-methyl modified nucleotide
  modified_base 124: mod_base = OTHER; note = Nucleotide with phosphorothioate linkage
  modified_base 125: mod_base = OTHER; note = 2'-O-methyl modified nucleotide with phosphorothioate linkage
  modified_base 126: mod_base = OTHER; note = 2'-O-methyl modified nucleotide with phosphorothioate linkage
  modified_base 127: mod_base = OTHER; note = 2'-O-methyl modified nucleotide
gagaatcaaaatcggtgaatgttttagagctagaaatagcaagttaaaataaggctagtccgttatcaacttgaaaaagtggcaccgagtcggtgcctgtctgcctatttgatgcaccgattttgat

SEQ ID NO: 16362 - RNA, 126 nt, synthetic construct
  source 1..126: mol_type = other RNA
  modified_base 1: mod_base = OTHER; note = 2'-O-methyl modified nucleotide with phosphorothioate linkage
  modified_base 2: mod_base = OTHER; note = 2'-O-methyl modified nucleotide with phosphorothioate linkage
  modified_base 3: mod_base = OTHER; note = 2'-O-methyl modified nucleotide with phosphorothioate linkage
  modified_base 29: mod_base = OTHER; note = 2'-O-methyl modified nucleotide
  modified_base 30: mod_base = OTHER; note = 2'-O-methyl modified nucleotide
  modified_base 31: mod_base = OTHER; note = 2'-O-methyl modified nucleotide
  modified_base 32: mod_base = OTHER; note = 2'-O-methyl modified nucleotide
  modified_base 33: mod_base = OTHER; note = 2'-O-methyl modified nucleotide
  modified_base 34: mod_base = OTHER; note = 2'-O-methyl modified nucleotide
  modified_base 35: mod_base = OTHER; note = 2'-O-methyl modified nucleotide
  modified_base 36: mod_base = OTHER; note = 2'-O-methyl modified nucleotide
  modified_base 37: mod_base = OTHER; note = 2'-O-methyl modified nucleotide
  modified_base 38: mod_base = OTHER; note = 2'-O-methyl modified nucleotide
  modified_base 39: mod_base = OTHER; note = 2'-O-methyl modified nucleotide
  modified_base 40: mod_base = OTHER; note = 2'-O-methyl modified nucleotide
  modified_base 69: mod_base = OTHER; note = 2'-O-methyl modified nucleotide
  modified_base 70: mod_base = OTHER; note = 2'-O-methyl modified nucleotide
  modified_base 71: mod_base = OTHER; note = 2'-O-methyl modified nucleotide
  modified_base 72: mod_base = OTHER; note = 2'-O-methyl modified nucleotide
  modified_base 73: mod_base = OTHER; note = 2'-O-methyl modified nucleotide
  modified_base 74: mod_base = OTHER; note = 2'-O-methyl modified nucleotide
  modified_base 75: mod_base = OTHER; note = 2'-O-methyl modified nucleotide
  modified_base 76: mod_base = OTHER; note = 2'-O-methyl modified nucleotide
  modified_base 77: mod_base = OTHER; note = 2'-O-methyl modified nucleotide
  modified_base 78: mod_base = OTHER; note = 2'-O-methyl modified nucleotide
  modified_base 79: mod_base = OTHER; note = 2'-O-methyl modified nucleotide
  modified_base 80: mod_base = OTHER; note = 2'-O-methyl modified nucleotide
  modified_base 81: mod_base = OTHER; note = 2'-O-methyl modified nucleotide
  modified_base 82: mod_base = OTHER; note = 2'-O-methyl modified nucleotide
  modified_base 83: mod_base = OTHER; note = 2'-O-methyl modified nucleotide
  modified_base 84: mod_base = OTHER; note = 2'-O-methyl modified nucleotide
  modified_base 85: mod_base = OTHER; note = 2'-O-methyl modified nucleotide
  modified_base 86: mod_base = OTHER; note = 2'-O-methyl modified nucleotide
  modified_base 87: mod_base = OTHER; note = 2'-O-methyl modified nucleotide
  modified_base 88: mod_base = OTHER; note = 2'-O-methyl modified nucleotide
  modified_base 89: mod_base = OTHER; note = 2'-O-methyl modified nucleotide
  modified_base 90: mod_base = OTHER; note = 2'-O-methyl modified nucleotide
  modified_base 91: mod_base = OTHER; note = 2'-O-methyl modified nucleotide
  modified_base 92: mod_base = OTHER; note = 2'-O-methyl modified nucleotide
  modified_base 93: mod_base = OTHER; note = 2'-O-methyl modified nucleotide
  modified_base 94: mod_base = OTHER; note = 2'-O-methyl modified nucleotide
  modified_base 95: mod_base = OTHER; note = 2'-O-methyl modified nucleotide
  modified_base 96: mod_base = OTHER; note = 2'-O-methyl modified nucleotide
  modified_base 123: mod_base = OTHER; note = Nucleotide with phosphorothioate linkage
  modified_base 124: mod_base = OTHER; note = 2'-O-methyl modified nucleotide with phosphorothioate linkage
  modified_base 125: mod_base = OTHER; note = 2'-O-methyl modified nucleotide with phosphorothioate linkage
  modified_base 126: mod_base = OTHER; note = 2'-O-methyl modified nucleotide
gagaatcaaaatcggtgaatgttttagagctagaaatagcaagttaaaataaggctagtccgttatcaacttgaaaaagtggcaccgagtcggtgcctgtctgcctatttgatgcaccgattttga

SEQ ID NO: 16363 - RNA, 125 nt, synthetic construct
  source 1..125: mol_type = other RNA
  modified_base 1: mod_base = OTHER; note = 2'-O-methyl modified nucleotide with phosphorothioate linkage
  modified_base 2: mod_base = OTHER; note = 2'-O-methyl modified nucleotide with phosphorothioate linkage
  modified_base 3: mod_base = OTHER; note = 2'-O-methyl modified nucleotide with phosphorothioate linkage
  modified_base 29: mod_base = OTHER; note = 2'-O-methyl modified nucleotide
  modified_base 30: mod_base = OTHER; note = 2'-O-methyl modified nucleotide
  modified_base 31: mod_base = OTHER; note = 2'-O-methyl modified nucleotide
  modified_base 32: mod_base = OTHER; note = 2'-O-methyl modified nucleotide
  modified_base 33: mod_base = OTHER; note = 2'-O-methyl modified nucleotide
  modified_base 34: mod_base = OTHER; note = 2'-O-methyl modified nucleotide
  modified_base 35: mod_base = OTHER; note = 2'-O-methyl modified nucleotide
  modified_base 36: mod_base = OTHER; note = 2'-O-methyl modified nucleotide
  modified_base 37: mod_base = OTHER; note = 2'-O-methyl modified nucleotide
  modified_base 38: mod_base = OTHER; note = 2'-O-methyl modified nucleotide
  modified_base 39: mod_base = OTHER; note = 2'-O-methyl modified nucleotide
  modified_base 40: mod_base = OTHER; note = 2'-O-methyl modified nucleotide
  modified_base 69: mod_base = OTHER; note = 2'-O-methyl modified nucleotide
  modified_base 70: mod_base = OTHER; note = 2'-O-methyl modified nucleotide
  modified_base 71: mod_base = OTHER; note = 2'-O-methyl modified nucleotide
  modified_base 72: mod_base = OTHER; note = 2'-O-methyl modified nucleotide
  modified_base 73: mod_base = OTHER; note = 2'-O-methyl modified nucleotide
  modified_base 74: mod_base = OTHER; note = 2'-O-methyl modified nucleotide
  modified_base 75: mod_base = OTHER; note = 2'-O-methyl modified nucleotide
  modified_base 76: mod_base = OTHER; note = 2'-O-methyl modified nucleotide
  modified_base 77: mod_base = OTHER; note = 2'-O-methyl modified nucleotide
  modified_base 78: mod_base = OTHER; note = 2'-O-methyl modified nucleotide
  modified_base 79: mod_base = OTHER; note = 2'-O-methyl modified nucleotide
  modified_base 80: mod_base = OTHER; note = 2'-O-methyl modified nucleotide
  modified_base 81: mod_base = OTHER; note = 2'-O-methyl modified nucleotide
  modified_base 82: mod_base = OTHER; note = 2'-O-methyl modified nucleotide
  modified_base 83: mod_base = OTHER; note = 2'-O-methyl modified nucleotide
  modified_base 84: mod_base = OTHER; note = 2'-O-methyl modified nucleotide
  modified_base 85: mod_base = OTHER; note = 2'-O-methyl modified nucleotide
  modified_base 86: mod_base = OTHER; note = 2'-O-methyl modified nucleotide
  modified_base 87: mod_base = OTHER; note = 2'-O-methyl modified nucleotide
  modified_base 88: mod_base = OTHER; note = 2'-O-methyl modified nucleotide
  modified_base 89: mod_base = OTHER; note = 2'-O-methyl modified nucleotide
  modified_base 90: mod_base = OTHER; note = 2'-O-methyl modified nucleotide
  modified_base 91: mod_base = OTHER; note = 2'-O-methyl modified nucleotide
  modified_base 92: mod_base = OTHER; note = 2'-O-methyl modified nucleotide
  modified_base 93: mod_base = OTHER; note = 2'-O-methyl modified nucleotide
  modified_base 94: mod_base = OTHER; note = 2'-O-methyl modified nucleotide
  modified_base 95: mod_base = OTHER; note = 2'-O-methyl modified nucleotide
  modified_base 96: mod_base = OTHER; note = 2'-O-methyl modified nucleotide
  modified_base 122: mod_base = OTHER; note = Nucleotide with phosphorothioate linkage
  modified_base 123: mod_base = OTHER; note = 2'-O-methyl modified nucleotide with phosphorothioate linkage
  modified_base 124: mod_base = OTHER; note = 2'-O-methyl modified nucleotide with phosphorothioate linkage
  modified_base 125: mod_base = OTHER; note = 2'-O-methyl modified nucleotide
gagaatcaaaatcggtgaatgttttagagctagaaatagcaagttaaaataaggctagtccgttatcaacttgaaaaagtggcaccgagtcggtgcctgtctgcctatttgatgcaccgattttg

SEQ ID NO: 16364 - RNA, 124 nt, synthetic construct
  source 1..124: mol_type = other RNA
  modified_base 1: mod_base = OTHER; note = 2'-O-methyl modified nucleotide with phosphorothioate linkage
  modified_base 2: mod_base = OTHER; note = 2'-O-methyl modified nucleotide with phosphorothioate linkage
  modified_base 3: mod_base = OTHER; note = 2'-O-methyl modified nucleotide with phosphorothioate linkage
  modified_base 29: mod_base = OTHER; note = 2'-O-methyl modified nucleotide
  modified_base 30: mod_base = OTHER; note = 2'-O-methyl modified nucleotide
  modified_base 31: mod_base = OTHER; note = 2'-O-methyl modified nucleotide
  modified_base 32: mod_base = OTHER; note = 2'-O-methyl modified nucleotide
  modified_base 33: mod_base = OTHER; note = 2'-O-methyl modified nucleotide
  modified_base 34: mod_base = OTHER; note = 2'-O-methyl modified nucleotide
  modified_base 35: mod_base = OTHER; note = 2'-O-methyl modified nucleotide
  modified_base 36: mod_base = OTHER; note = 2'-O-methyl modified nucleotide
  modified_base 37: mod_base = OTHER; note = 2'-O-methyl modified nucleotide
  modified_base 38: mod_base = OTHER; note = 2'-O-methyl modified nucleotide
  modified_base 39: mod_base = OTHER; note = 2'-O-methyl modified nucleotide
  modified_base 40: mod_base = OTHER; note = 2'-O-methyl modified nucleotide
  modified_base 69: mod_base = OTHER; note = 2'-O-methyl modified nucleotide
  modified_base 70: mod_base = OTHER; note = 2'-O-methyl modified nucleotide
  modified_base 71: mod_base = OTHER; note = 2'-O-methyl modified nucleotide
  modified_base 72: mod_base = OTHER; note = 2'-O-methyl modified nucleotide
  modified_base 73: mod_base = OTHER; note = 2'-O-methyl modified nucleotide
  modified_base 74: mod_base = OTHER; note = 2'-O-methyl modified nucleotide
  modified_base 75: mod_base = OTHER; note = 2'-O-methyl modified nucleotide
  modified_base 76: mod_base = OTHER; note = 2'-O-methyl modified nucleotide
  modified_base 77: mod_base = OTHER; note = 2'-O-methyl modified nucleotide
  modified_base 78: mod_base = OTHER; note = 2'-O-methyl modified nucleotide
  modified_base 79: mod_base = OTHER; note = 2'-O-methyl modified nucleotide
  modified_base 80: mod_base = OTHER; note = 2'-O-methyl modified nucleotide
  modified_base 81: mod_base = OTHER; note = 2'-O-methyl modified nucleotide
  modified_base 82: mod_base = OTHER; note = 2'-O-methyl modified nucleotide
  modified_base 83: mod_base = OTHER; note = 2'-O-methyl modified nucleotide
  modified_base 84: mod_base = OTHER; note = 2'-O-methyl modified nucleotide
  modified_base 85: mod_base = OTHER; note = 2'-O-methyl modified nucleotide
  modified_base 86: mod_base = OTHER; note = 2'-O-methyl modified nucleotide
  modified_base 87: mod_base = OTHER; note = 2'-O-methyl modified nucleotide
  modified_base 88: mod_base = OTHER; note = 2'-O-methyl modified nucleotide
  modified_base 89: mod_base = OTHER; note = 2'-O-methyl modified nucleotide
  modified_base 90: mod_base = OTHER; note = 2'-O-methyl modified nucleotide
  modified_base 91: mod_base = OTHER; note = 2'-O-methyl modified nucleotide
  modified_base 92: mod_base = OTHER; note = 2'-O-methyl modified nucleotide
  modified_base 93: mod_base = OTHER; note = 2'-O-methyl modified nucleotide
  modified_base 94: mod_base = OTHER; note = 2'-O-methyl modified nucleotide
  modified_base 95: mod_base = OTHER; note = 2'-O-methyl modified nucleotide
  modified_base 96: mod_base = OTHER; note = 2'-O-methyl modified nucleotide
  modified_base 121: mod_base = OTHER; note = Nucleotide with phosphorothioate linkage
  modified_base 122: mod_base = OTHER; note = 2'-O-methyl modified nucleotide with phosphorothioate linkage
  modified_base 123: mod_base = OTHER; note = 2'-O-methyl modified nucleotide with phosphorothioate linkage
  modified_base 124: mod_base = OTHER; note = 2'-O-methyl modified nucleotide
gagaatcaaaatcggtgaatgttttagagctagaaatagcaagttaaaataaggctagtccgttatcaacttgaaaaagtggcaccgagtcggtgcctgtctgcctatttgatgcaccgatttt

SEQ ID NO: 16365 - RNA, 123 nt, synthetic construct
  source 1..123: mol_type = other RNA
  modified_base 1: mod_base = OTHER; note = 2'-O-methyl modified nucleotide with phosphorothioate linkage
  modified_base 2: mod_base = OTHER; note = 2'-O-methyl modified nucleotide with phosphorothioate linkage
  modified_base 3: mod_base = OTHER; note = 2'-O-methyl modified nucleotide with phosphorothioate linkage
  modified_base 29: mod_base = OTHER; note = 2'-O-methyl modified nucleotide
  modified_base 30: mod_base = OTHER; note = 2'-O-methyl modified nucleotide
  modified_base 31: mod_base = OTHER; note = 2'-O-methyl modified nucleotide
  modified_base 32: mod_base = OTHER; note = 2'-O-methyl modified nucleotide
  modified_base 33: mod_base = OTHER; note = 2'-O-methyl modified nucleotide
  modified_base 34: mod_base = OTHER; note = 2'-O-methyl modified nucleotide
  modified_base 35: mod_base = OTHER; note = 2'-O-methyl modified nucleotide
  modified_base 36: mod_base = OTHER; note = 2'-O-methyl modified nucleotide
  modified_base 37: mod_base = OTHER; note = 2'-O-methyl modified nucleotide
  modified_base 38: mod_base = OTHER; note = 2'-O-methyl modified nucleotide
  modified_base 39: mod_base = OTHER; note = 2'-O-methyl modified nucleotide
  modified_base 40: mod_base = OTHER; note = 2'-O-methyl modified nucleotide
  modified_base 69: mod_base = OTHER; note = 2'-O-methyl modified nucleotide
  modified_base 70: mod_base = OTHER; note = 2'-O-methyl modified nucleotide
  modified_base 71: mod_base = OTHER; note = 2'-O-methyl modified nucleotide
  modified_base 72: mod_base = OTHER; note = 2'-O-methyl modified nucleotide
  modified_base 73: mod_base = OTHER; note = 2'-O-methyl modified nucleotide
  modified_base 74: mod_base = OTHER; note = 2'-O-methyl modified nucleotide
  modified_base 75: mod_base = OTHER; note = 2'-O-methyl modified nucleotide
  modified_base 76: mod_base = OTHER; note = 2'-O-methyl modified nucleotide
  modified_base 77: mod_base = OTHER; note = 2'-O-methyl modified nucleotide
  modified_base 78: mod_base = OTHER; note = 2'-O-methyl modified nucleotide
  modified_base 79: mod_base = OTHER; note = 2'-O-methyl modified nucleotide
  modified_base 80: mod_base = OTHER; note = 2'-O-methyl modified nucleotide
  modified_base 81: mod_base = OTHER; note = 2'-O-methyl modified nucleotide
  modified_base 82: mod_base = OTHER; note = 2'-O-methyl modified nucleotide
  modified_base 83: mod_base = OTHER; note = 2'-O-methyl modified nucleotide
  modified_base 84: mod_base = OTHER; note = 2'-O-methyl modified nucleotide
  modified_base 85: mod_base = OTHER; note = 2'-O-methyl modified nucleotide
  modified_base 86: mod_base = OTHER; note = 2'-O-methyl modified nucleotide
  modified_base 87: mod_base = OTHER; note = 2'-O-methyl modified nucleotide
  modified_base 88: mod_base = OTHER; note = 2'-O-methyl modified nucleotide
  modified_base 89: mod_base = OTHER; note = 2'-O-methyl modified nucleotide
  modified_base 90: mod_base = OTHER; note = 2'-O-methyl modified nucleotide
  modified_base 91: mod_base = OTHER; note = 2'-O-methyl modified nucleotide
  modified_base 92: mod_base = OTHER; note = 2'-O-methyl modified nucleotide
  modified_base 93: mod_base = OTHER; note = 2'-O-methyl modified nucleotide
  modified_base 94: mod_base = OTHER; note = 2'-O-methyl modified nucleotide
  modified_base 95: mod_base = OTHER; note = 2'-O-methyl modified nucleotide
  modified_base 96: mod_base = OTHER; note = 2'-O-methyl modified nucleotide
  modified_base 120: mod_base = OTHER; note = Nucleotide with phosphorothioate linkage
  modified_base 121: mod_base = OTHER; note = 2'-O-methyl modified nucleotide with phosphorothioate linkage
  modified_base 122: mod_base = OTHER; note = 2'-O-methyl modified nucleotide with phosphorothioate linkage
  modified_base 123: mod_base = OTHER; note = 2'-O-methyl modified nucleotide
gagaatcaaaatcggtgaatgttttagagctagaaatagcaagttaaaataaggctagtccgttatcaacttgaaaaagtggcaccgagtcggtgcctgtctgcctatttgatgcaccgattt

SEQ ID NO: 16366 - RNA, 122 nt, synthetic construct
  source 1..122: mol_type = other RNA
  modified_base 1: mod_base = OTHER; note = 2'-O-methyl modified nucleotide with phosphorothioate linkage
  modified_base 2: mod_base = OTHER; note = 2'-O-methyl modified nucleotide with phosphorothioate linkage
  modified_base 3: mod_base = OTHER; note = 2'-O-methyl modified nucleotide with phosphorothioate linkage
  modified_base 29: mod_base = OTHER; note = 2'-O-methyl modified nucleotide
  modified_base 30: mod_base = OTHER; note = 2'-O-methyl modified nucleotide
  modified_base 31: mod_base = OTHER; note = 2'-O-methyl modified nucleotide
  modified_base 32: mod_base = OTHER; note = 2'-O-methyl modified nucleotide
  modified_base 33: mod_base = OTHER; note = 2'-O-methyl modified nucleotide
  modified_base 34: mod_base = OTHER; note = 2'-O-methyl modified nucleotide
  modified_base 35: mod_base = OTHER; note = 2'-O-methyl modified nucleotide
  modified_base 36: mod_base = OTHER; note = 2'-O-methyl modified nucleotide
  modified_base 37: mod_base = OTHER; note = 2'-O-methyl modified nucleotide
  modified_base 38: mod_base = OTHER; note = 2'-O-methyl modified nucleotide
  modified_base 39: mod_base = OTHER; note = 2'-O-methyl modified nucleotide
  modified_base 40: mod_base = OTHER; note = 2'-O-methyl modified nucleotide
  modified_base 69: mod_base = OTHER; note = 2'-O-methyl modified nucleotide
  modified_base 70: mod_base = OTHER; note = 2'-O-methyl modified nucleotide
  modified_base 71: mod_base = OTHER; note = 2'-O-methyl modified nucleotide
  modified_base 72: mod_base = OTHER; note = 2'-O-methyl modified nucleotide
  modified_base 73: mod_base = OTHER; note = 2'-O-methyl modified nucleotide
  modified_base 74: mod_base = OTHER; note = 2'-O-methyl modified nucleotide
  modified_base 75: mod_base = OTHER; note = 2'-O-methyl modified nucleotide
  modified_base 76: mod_base = OTHER; note = 2'-O-methyl modified nucleotide
  modified_base 77: mod_base = OTHER; note = 2'-O-methyl modified nucleotide
  modified_base 78: mod_base = OTHER; note = 2'-O-methyl modified nucleotide
  modified_base 79: mod_base = OTHER; note = 2'-O-methyl modified nucleotide
  modified_base 80: mod_base = OTHER; note = 2'-O-methyl modified nucleotide
  modified_base 81: mod_base = OTHER; note = 2'-O-methyl modified nucleotide
  modified_base 82: mod_base = OTHER; note = 2'-O-methyl modified nucleotide
  modified_base 83: mod_base = OTHER; note = 2'-O-methyl modified nucleotide
  modified_base 84: mod_base = OTHER; note = 2'-O-methyl modified nucleotide
  modified_base 85: mod_base = OTHER; note = 2'-O-methyl modified nucleotide
  modified_base 86: mod_base = OTHER; note = 2'-O-methyl modified nucleotide
  modified_base 87: mod_base = OTHER; note = 2'-O-methyl modified nucleotide
  modified_base 88: mod_base = OTHER; note = 2'-O-methyl modified nucleotide
  modified_base 89: mod_base = OTHER; note = 2'-O-methyl modified nucleotide
  modified_base 90: mod_base = OTHER; note = 2'-O-methyl modified nucleotide
  modified_base 91: mod_base = OTHER; note = 2'-O-methyl modified nucleotide
  modified_base 92: mod_base = OTHER; note = 2'-O-methyl modified nucleotide
  modified_base 93: mod_base = OTHER; note = 2'-O-methyl modified nucleotide
  modified_base 94: mod_base = OTHER; note = 2'-O-methyl modified nucleotide
  modified_base 95: mod_base = OTHER; note = 2'-O-methyl modified nucleotide
  modified_base 96: mod_base = OTHER; note = 2'-O-methyl modified nucleotide
  modified_base 119: mod_base = OTHER; note = Nucleotide with phosphorothioate linkage
  modified_base 120: mod_base = OTHER; note = 2'-O-methyl modified nucleotide with phosphorothioate linkage
  modified_base 121: mod_base = OTHER; note = 2'-O-methyl modified nucleotide with phosphorothioate linkage
  modified_base 122: mod_base = OTHER; note = 2'-O-methyl modified nucleotide
gagaatcaaaatcggtgaatgttttagagctagaaatagcaagttaaaataaggctagtccgttatcaacttgaaaaagtggcaccgagtcggtgcctgtctgcctatttgatgcaccgatt

SEQ ID NO: 16367 - RNA, 129 nt, synthetic construct
  source 1..129: mol_type = other RNA
  modified_base 1: mod_base = OTHER; note = 2'-O-methyl modified nucleotide with phosphorothioate linkage
  modified_base 2: mod_base = OTHER; note = 2'-O-methyl modified nucleotide with phosphorothioate linkage
  modified_base 3: mod_base = OTHER; note = 2'-O-methyl modified nucleotide with phosphorothioate linkage
  modified_base 29: mod_base = OTHER; note = 2'-O-methyl modified nucleotide
  modified_base 30: mod_base = OTHER; note = 2'-O-methyl modified nucleotide
  modified_base 31: mod_base = OTHER; note = 2'-O-methyl modified nucleotide
  modified_base 32: mod_base = OTHER; note = 2'-O-methyl modified nucleotide
  modified_base 33: mod_base = OTHER; note = 2'-O-methyl modified nucleotide
  modified_base 34: mod_base = OTHER; note = 2'-O-methyl modified nucleotide
  modified_base 35: mod_base = OTHER; note = 2'-O-methyl modified nucleotide
  modified_base 36: mod_base = OTHER; note = 2'-O-methyl modified nucleotide
  modified_base 37: mod_base = OTHER; note = 2'-O-methyl modified nucleotide
  modified_base 38: mod_base = OTHER; note = 2'-O-methyl modified nucleotide
  modified_base 39: mod_base = OTHER; note = 2'-O-methyl modified nucleotide
  modified_base 40: mod_base = OTHER; note = 2'-O-methyl modified nucleotide
  modified_base 69: mod_base = OTHER; note = 2'-O-methyl modified nucleotide
  modified_base 70: mod_base = OTHER; note = 2'-O-methyl modified nucleotide
  modified_base 71: mod_base = OTHER; note = 2'-O-methyl modified nucleotide
  modified_base 72: mod_base = OTHER; note = 2'-O-methyl modified nucleotide
  modified_base 73: mod_base = OTHER; note = 2'-O-methyl modified nucleotide
  modified_base 74: mod_base = OTHER; note = 2'-O-methyl modified nucleotide
  modified_base 75: mod_base = OTHER; note = 2'-O-methyl modified nucleotide
  modified_base 76: mod_base = OTHER; note = 2'-O-methyl modified nucleotide
  modified_base 77: mod_base = OTHER; note = 2'-O-methyl modified nucleotide
  modified_base 78: mod_base = OTHER; note = 2'-O-methyl modified nucleotide
  modified_base 79: mod_base = OTHER; note = 2'-O-methyl modified nucleotide
  modified_base 80: mod_base = OTHER; note = 2'-O-methyl modified nucleotide
  modified_base 81: mod_base = OTHER; note = 2'-O-methyl modified nucleotide
  modified_base 82: mod_base = OTHER; note = 2'-O-methyl modified nucleotide
  modified_base 83: mod_base = OTHER; note = 2'-O-methyl modified nucleotide
  modified_base 84: mod_base = OTHER; note = 2'-O-methyl modified nucleotide
  modified_base 85: mod_base = OTHER; note = 2'-O-methyl modified nucleotide
  modified_base 86: mod_base = OTHER; note = 2'-O-methyl modified nucleotide
  modified_base 87: mod_base = OTHER; note = 2'-O-methyl modified nucleotide
  modified_base 88: mod_base = OTHER; note = 2'-O-methyl modified nucleotide
  modified_base 89: mod_base = OTHER; note = 2'-O-methyl modified nucleotide
  modified_base 90: mod_base = OTHER; note = 2'-O-methyl modified nucleotide
  modified_base 91: mod_base = OTHER; note = 2'-O-methyl modified nucleotide
  modified_base 92: mod_base = OTHER; note = 2'-O-methyl modified nucleotide
  modified_base 93: mod_base = OTHER; note = 2'-O-methyl modified nucleotide
  modified_base 94: mod_base = OTHER; note = 2'-O-methyl modified nucleotide
  modified_base 95: mod_base = OTHER; note = 2'-O-methyl modified nucleotide
  modified_base 96: mod_base = OTHER; note = 2'-O-methyl modified nucleotide
  modified_base 126: mod_base = OTHER; note = Nucleotide with phosphorothioate linkage
  modified_base 127: mod_base = OTHER; note = 2'-O-methyl modified nucleotide with phosphorothioate linkage
  modified_base 128: mod_base = OTHER; note = 2'-O-methyl modified nucleotide with phosphorothioate linkage
  modified_base 129: mod_base = OTHER; note = 2'-O-methyl modified nucleotide
gagaatcaaaatcggtgaatgttttagagctagaaatagcaagttaaaataaggctagtccgttatcaacttgaaaaagtggcaccgagtcggtgcgtctgtctgcctatttgatgcaccgattttgat

SEQ ID NO: 16368 - RNA, 128 nt, synthetic construct
  source 1..128: mol_type = other RNA
  modified_base 1: mod_base = OTHER; note = 2'-O-methyl modified nucleotide with phosphorothioate linkage
  modified_base 2: mod_base = OTHER; note = 2'-O-methyl modified nucleotide with phosphorothioate linkage
  modified_base 3: mod_base = OTHER; note = 2'-O-methyl modified nucleotide with phosphorothioate linkage
  modified_base 29: mod_base = OTHER; note = 2'-O-methyl modified nucleotide
  modified_base 30: mod_base = OTHER; note = 2'-O-methyl modified nucleotide
  modified_base 31: mod_base = OTHER; note = 2'-O-methyl modified nucleotide
  modified_base 32: mod_base = OTHER; note = 2'-O-methyl modified nucleotide
  modified_base 33: mod_base = OTHER; note = 2'-O-methyl modified nucleotide
  modified_base 34: mod_base = OTHER; note = 2'-O-methyl modified nucleotide
  modified_base 35: mod_base = OTHER; note = 2'-O-methyl modified nucleotide
  modified_base 36: mod_base = OTHER; note = 2'-O-methyl modified nucleotide
  modified_base 37: mod_base = OTHER; note = 2'-O-methyl modified nucleotide
  modified_base 38: mod_base = OTHER; note = 2'-O-methyl modified nucleotide
  modified_base 39: mod_base = OTHER; note = 2'-O-methyl modified nucleotide
  modified_base 40: mod_base = OTHER; note = 2'-O-methyl modified nucleotide
  modified_base 69: mod_base = OTHER; note = 2'-O-methyl modified nucleotide
  modified_base 70: mod_base = OTHER; note = 2'-O-methyl modified nucleotide
  modified_base 71: mod_base = OTHER; note = 2'-O-methyl modified nucleotide
  modified_base 72: mod_base = OTHER; note = 2'-O-methyl modified nucleotide
  modified_base 73: mod_base = OTHER; note = 2'-O-methyl modified nucleotide
  modified_base 74: mod_base = OTHER; note = 2'-O-methyl modified nucleotide
  modified_base 75: mod_base = OTHER; note = 2'-O-methyl modified nucleotide
  modified_base 76: mod_base = OTHER; note = 2'-O-methyl modified nucleotide
  modified_base 77: mod_base = OTHER; note = 2'-O-methyl modified nucleotide
  modified_base 78: mod_base = OTHER; note = 2'-O-methyl modified nucleotide
  modified_base 79: mod_base = OTHER; note = 2'-O-methyl modified nucleotide
  modified_base 80: mod_base = OTHER; note = 2'-O-methyl modified nucleotide
  modified_base 81: mod_base = OTHER; note = 2'-O-methyl modified nucleotide
  modified_base 82: mod_base = OTHER; note = 2'-O-methyl modified nucleotide
  modified_base 83: mod_base = OTHER; note = 2'-O-methyl modified nucleotide
  modified_base 84: mod_base = OTHER; note = 2'-O-methyl modified nucleotide
  modified_base 85: mod_base = OTHER; note = 2'-O-methyl modified nucleotide
  modified_base 86: mod_base = OTHER; note = 2'-O-methyl modified nucleotide
  modified_base 87: mod_base = OTHER; note = 2'-O-methyl modified nucleotide
  modified_base 88: mod_base = OTHER; note = 2'-O-methyl modified nucleotide
  modified_base 89: mod_base = OTHER; note = 2'-O-methyl modified nucleotide
  modified_base 90: mod_base = OTHER; note = 2'-O-methyl modified nucleotide
  modified_base 91: mod_base = OTHER; note = 2'-O-methyl modified nucleotide
  modified_base 92: mod_base = OTHER; note = 2'-O-methyl modified nucleotide
  modified_base 93: mod_base = OTHER; note = 2'-O-methyl modified nucleotide
  modified_base 94: mod_base = OTHER; note = 2'-O-methyl modified nucleotide
  modified_base 95: mod_base = OTHER; note = 2'-O-methyl modified nucleotide
  modified_base 96: mod_base = OTHER; note = 2'-O-methyl modified nucleotide
  modified_base 125: mod_base = OTHER; note = Nucleotide with phosphorothioate linkage
  modified_base 126: mod_base = OTHER; note = 2'-O-methyl modified nucleotide with phosphorothioate linkage
  modified_base 127: mod_base = OTHER; note = 2'-O-methyl modified nucleotide with phosphorothioate linkage
  modified_base 128: mod_base = OTHER; note = 2'-O-methyl modified nucleotide
gagaatcaaaatcggtgaatgttttagagctagaaatagcaagttaaaataaggctagtccgttatcaacttgaaaaagtggcaccgagtcggtgcgtctgtctgcctatttgatgcaccgattttga

SEQ ID NO: 16369 - RNA, 127 nt, synthetic construct
  source 1..127: mol_type = other RNA
  modified_base 1: mod_base = OTHER; note = 2'-O-methyl modified nucleotide with phosphorothioate linkage
  modified_base 2: mod_base = OTHER; note = 2'-O-methyl modified nucleotide with phosphorothioate linkage
  modified_base 3: mod_base = OTHER; note = 2'-O-methyl modified nucleotide with phosphorothioate linkage
  modified_base 29: mod_base = OTHER; note = 2'-O-methyl modified nucleotide
  modified_base 30: mod_base = OTHER; note = 2'-O-methyl modified nucleotide
  modified_base 31: mod_base = OTHER; note = 2'-O-methyl modified nucleotide
  modified_base 32: mod_base = OTHER; note = 2'-O-methyl modified nucleotide
  modified_base 33: mod_base = OTHER; note = 2'-O-methyl modified nucleotide
  modified_base 34: mod_base = OTHER; note = 2'-O-methyl modified nucleotide
  modified_base 35: mod_base = OTHER; note = 2'-O-methyl modified nucleotide
  modified_base 36: mod_base = OTHER; note = 2'-O-methyl modified nucleotide
  modified_base 37: mod_base = OTHER; note = 2'-O-methyl modified nucleotide
  modified_base 38: mod_base = OTHER; note = 2'-O-methyl modified nucleotide
  modified_base 39: mod_base = OTHER; note = 2'-O-methyl modified nucleotide
  modified_base 40: mod_base = OTHER; note = 2'-O-methyl modified nucleotide
  modified_base 69: mod_base = OTHER; note = 2'-O-methyl modified nucleotide
  modified_base 70: mod_base = OTHER; note = 2'-O-methyl modified nucleotide
  modified_base 71: mod_base = OTHER; note = 2'-O-methyl modified nucleotide
  modified_base 72: mod_base = OTHER; note = 2'-O-methyl modified nucleotide
  modified_base 73: mod_base = OTHER; note = 2'-O-methyl modified nucleotide
  modified_base 74: mod_base = OTHER; note = 2'-O-methyl modified nucleotide
  modified_base 75: mod_base = OTHER; note = 2'-O-methyl modified nucleotide
  modified_base 76: mod_base = OTHER; note = 2'-O-methyl modified nucleotide
  modified_base 77: mod_base = OTHER; note = 2'-O-methyl modified nucleotide
  modified_base 78: mod_base = OTHER; note = 2'-O-methyl modified nucleotide
  modified_base 79: mod_base = OTHER; note = 2'-O-methyl modified nucleotide
  modified_base 80: mod_base = OTHER; note = 2'-O-methyl modified nucleotide
  modified_base 81: mod_base = OTHER; note = 2'-O-methyl modified nucleotide
  modified_base 82: mod_base = OTHER; note = 2'-O-methyl modified nucleotide
  modified_base 83: mod_base = OTHER; note = 2'-O-methyl modified nucleotide
  modified_base 84: mod_base = OTHER; note = 2'-O-methyl modified nucleotide
  modified_base 85: mod_base = OTHER; note = 2'-O-methyl modified nucleotide
  modified_base 86: mod_base = OTHER; note = 2'-O-methyl modified nucleotide
  modified_base 87: mod_base = OTHER; note = 2'-O-methyl modified nucleotide
  modified_base 88: mod_base = OTHER; note = 2'-O-methyl modified nucleotide
  modified_base 89: mod_base = OTHER; note = 2'-O-methyl modified nucleotide
  modified_base 90: mod_base = OTHER; note = 2'-O-methyl modified nucleotide
  modified_base 91: mod_base = OTHER; note = 2'-O-methyl modified nucleotide
  modified_base 92: mod_base = OTHER; note = 2'-O-methyl modified nucleotide
  modified_base 93: mod_base = OTHER; note = 2'-O-methyl modified nucleotide
  modified_base 94: mod_base = OTHER; note = 2'-O-methyl modified nucleotide
  modified_base 95: mod_base = OTHER; note = 2'-O-methyl modified nucleotide
  modified_base 96: mod_base = OTHER; note = 2'-O-methyl modified nucleotide
  modified_base 124: mod_base = OTHER; note = Nucleotide with phosphorothioate linkage
  modified_base 125: mod_base = OTHER; note = 2'-O-methyl modified nucleotide with phosphorothioate linkage
  modified_base 126: mod_base = OTHER; note = 2'-O-methyl modified nucleotide with phosphorothioate linkage
  modified_base 127: mod_base = OTHER; note = 2'-O-methyl modified nucleotide
gagaatcaaaatcggtgaatgttttagagctagaaatagcaagttaaaataaggctagtccgttatcaacttgaaaaagtggcaccgagtcggtgcgtctgtctgcctatttgatgcaccgattttg

SEQ ID NO: 16370 - RNA, 126 nt, synthetic construct
  source 1..126: mol_type = other RNA
  modified_base 1: mod_base = OTHER; note = 2'-O-methyl modified nucleotide with phosphorothioate linkage
  modified_base 2: mod_base = OTHER; note = 2'-O-methyl modified nucleotide with phosphorothioate linkage
  modified_base 3: mod_base = OTHER; note = 2'-O-methyl modified nucleotide with phosphorothioate linkage
  modified_base 29: mod_base = OTHER; note = 2'-O-methyl modified nucleotide
  modified_base 30: mod_base = OTHER; note = 2'-O-methyl modified nucleotide
  modified_base 31: mod_base = OTHER; note = 2'-O-methyl modified nucleotide
  modified_base 32: mod_base = OTHER; note = 2'-O-methyl modified nucleotide
  modified_base 33: mod_base = OTHER; note = 2'-O-methyl modified nucleotide
  modified_base 34: mod_base = OTHER; note = 2'-O-methyl modified nucleotide
  modified_base 35: mod_base = OTHER; note = 2'-O-methyl modified nucleotide
  modified_base 36: mod_base = OTHER; note = 2'-O-methyl modified nucleotide
  modified_base 37: mod_base = OTHER; note = 2'-O-methyl modified nucleotide
  modified_base 38: mod_base = OTHER; note = 2'-O-methyl modified nucleotide
  modified_base 39: mod_base = OTHER; note = 2'-O-methyl modified nucleotide
  modified_base 40: mod_base = OTHER; note = 2'-O-methyl modified nucleotide
  modified_base 69: mod_base = OTHER; note = 2'-O-methyl modified nucleotide
  modified_base 70: mod_base = OTHER; note = 2'-O-methyl modified nucleotide
  modified_base 71: mod_base = OTHER; note = 2'-O-methyl modified nucleotide
  modified_base 72: mod_base = OTHER; note = 2'-O-methyl modified nucleotide
  modified_base 73: mod_base = OTHER; note = 2'-O-methyl modified nucleotide
  modified_base 74: mod_base = OTHER; note = 2'-O-methyl modified nucleotide
  modified_base 75: mod_base = OTHER; note = 2'-O-methyl modified nucleotide
  modified_base 76: mod_base = OTHER; note = 2'-O-methyl modified nucleotide
  modified_base 77: mod_base = OTHER; note = 2'-O-methyl modified nucleotide
  modified_base 78: mod_base = OTHER; note = 2'-O-methyl modified nucleotide
  modified_base 79: mod_base = OTHER; note = 2'-O-methyl modified nucleotide
  modified_base 80: mod_base = OTHER; note = 2'-O-methyl modified nucleotide
  modified_base 81: mod_base = OTHER; note = 2'-O-methyl modified nucleotide
  modified_base 82: mod_base = OTHER; note = 2'-O-methyl modified nucleotide
  modified_base 83: mod_base = OTHER; note = 2'-O-methyl modified nucleotide
  modified_base 84: mod_base = OTHER; note = 2'-O-methyl modified nucleotide
  modified_base 85: mod_base = OTHER; note = 2'-O-methyl modified nucleotide
  modified_base 86: mod_base = OTHER; note = 2'-O-methyl modified nucleotide
  modified_base 87: mod_base = OTHER; note = 2'-O-methyl modified nucleotide
  modified_base 88: mod_base = OTHER; note = 2'-O-methyl modified nucleotide
  modified_base 89: mod_base = OTHER; note = 2'-O-methyl modified nucleotide
  modified_base 90: mod_base = OTHER; note = 2'-O-methyl modified nucleotide
  modified_base 91: mod_base = OTHER; note = 2'-O-methyl modified nucleotide
  modified_base 92: mod_base = OTHER; note = 2'-O-methyl modified nucleotide
  modified_base 93: mod_base = OTHER; note = 2'-O-methyl modified nucleotide
  modified_base 94: mod_base = OTHER; note = 2'-O-methyl modified nucleotide
  modified_base 95: mod_base = OTHER; note = 2'-O-methyl modified nucleotide
  modified_base 96: mod_base = OTHER; note = 2'-O-methyl modified nucleotide
  modified_base 123: mod_base = OTHER; note = Nucleotide with phosphorothioate linkage
  modified_base 124: mod_base = OTHER; note = 2'-O-methyl modified nucleotide with phosphorothioate linkage
  modified_base 125: mod_base = OTHER; note = 2'-O-methyl modified nucleotide with phosphorothioate linkage
  modified_base 126: mod_base = OTHER; note = 2'-O-methyl modified nucleotide
gagaatcaaaatcggtgaatgttttagagctagaaatagcaagttaaaataaggctagtccgttatcaacttgaaaaagtggcaccgagtcggtgcgtctgtctgcctatttgatgcaccgatttt

SEQ ID NO: 16371 - RNA, 125 nt, synthetic construct
  source 1..125: mol_type = other RNA
  modified_base 1: mod_base = OTHER; note = 2'-O-methyl modified nucleotide with phosphorothioate linkage
  modified_base 2: mod_base = OTHER; note = 2'-O-methyl modified nucleotide with phosphorothioate linkage
  modified_base 3: mod_base = OTHER; note = 2'-O-methyl modified nucleotide with phosphorothioate linkage
  modified_base 29: mod_base = OTHER; note = 2'-O-methyl modified nucleotide
  modified_base 30: mod_base = OTHER; note = 2'-O-methyl modified nucleotide
  modified_base 31: mod_base = OTHER; note = 2'-O-methyl modified nucleotide
  modified_base 32: mod_base = OTHER; note = 2'-O-methyl modified nucleotide
  modified_base 33: mod_base = OTHER; note = 2'-O-methyl modified nucleotide
  modified_base 34: mod_base = OTHER; note = 2'-O-methyl modified nucleotide
  modified_base 35: mod_base = OTHER; note = 2'-O-methyl modified nucleotide
  modified_base 36: mod_base = OTHER; note = 2'-O-methyl modified nucleotide
  modified_base 37: mod_base = OTHER; note = 2'-O-methyl modified nucleotide
  modified_base 38: mod_base = OTHER; note = 2'-O-methyl modified nucleotide
  modified_base 39: mod_base = OTHER; note = 2'-O-methyl modified nucleotide
  modified_base 40: mod_base = OTHER; note = 2'-O-methyl modified nucleotide
  modified_base 69: mod_base = OTHER; note = 2'-O-methyl modified nucleotide
  modified_base 70: mod_base = OTHER; note = 2'-O-methyl modified nucleotide
  modified_base 71: mod_base = OTHER; note = 2'-O-methyl modified nucleotide
  modified_base 72: mod_base = OTHER; note = 2'-O-methyl modified nucleotide
  modified_base 73: mod_base = OTHER; note = 2'-O-methyl modified nucleotide
  modified_base 74: mod_base = OTHER; note = 2'-O-methyl modified nucleotide
  modified_base 75: mod_base = OTHER; note = 2'-O-methyl modified nucleotide
  modified_base 76: mod_base = OTHER; note = 2'-O-methyl modified nucleotide
  modified_base 77: mod_base = OTHER; note = 2'-O-methyl modified nucleotide
  modified_base 78: mod_base = OTHER; note = 2'-O-methyl modified nucleotide
  modified_base 79: mod_base = OTHER; note = 2'-O-methyl modified nucleotide
  modified_base 80: mod_base = OTHER; note = 2'-O-methyl modified nucleotide
  modified_base 81: mod_base = OTHER; note = 2'-O-methyl modified nucleotide
  modified_base 82: mod_base = OTHER; note = 2'-O-methyl modified nucleotide
  modified_base 83: mod_base = OTHER; note = 2'-O-methyl modified nucleotide
  modified_base 84: mod_base = OTHER; note = 2'-O-methyl modified nucleotide
  modified_base 85: mod_base = OTHER; note = 2'-O-methyl modified nucleotide
  modified_base 86: mod_base = OTHER; note = 2'-O-methyl modified nucleotide
  modified_base 87: mod_base = OTHER; note = 2'-O-methyl modified nucleotide
  modified_base 88: mod_base = OTHER; note = 2'-O-methyl modified nucleotide
  modified_base 89: mod_base = OTHER; note = 2'-O-methyl modified nucleotide
  modified_base 90: mod_base = OTHER; note = 2'-O-methyl modified nucleotide
  modified_base 91: mod_base = OTHER; note = 2'-O-methyl modified nucleotide
  modified_base 92: mod_base = OTHER; note = 2'-O-methyl modified nucleotide
  modified_base 93: mod_base = OTHER; note = 2'-O-methyl modified nucleotide
  modified_base 94: mod_base = OTHER; note = 2'-O-methyl modified nucleotide
  modified_base 95: mod_base = OTHER; note = 2'-O-methyl modified nucleotide
  modified_base 96: mod_base = OTHER; note = 2'-O-methyl modified nucleotide
  modified_base 122: mod_base = OTHER; note = Nucleotide with phosphorothioate linkage
  modified_base 123: mod_base = OTHER; note = 2'-O-methyl modified nucleotide with phosphorothioate linkage
  modified_base 124: mod_base = OTHER; note = 2'-O-methyl modified nucleotide with phosphorothioate linkage
  modified_base 125: mod_base = OTHER; note = 2'-O-methyl modified nucleotide
gagaatcaaaatcggtgaatgttttagagctagaaatagcaagttaaaataaggctagtccgttatcaacttgaaaaagtggcaccgagtcggtgcgtctgtctgcctatttgatgcaccgattt

SEQ ID NO: 16372 - RNA, 124 nt, synthetic construct
  source 1..124: mol_type = other RNA
  modified_base 1: mod_base = OTHER; note = 2'-O-methyl modified nucleotide with phosphorothioate linkage
  modified_base 2: mod_base = OTHER; note = 2'-O-methyl modified nucleotide with phosphorothioate linkage
  modified_base 3: mod_base = OTHER; note = 2'-O-methyl modified nucleotide with phosphorothioate linkage
  modified_base 29: mod_base = OTHER; note = 2'-O-methyl modified nucleotide
  modified_base 30: mod_base = OTHER; note = 2'-O-methyl modified nucleotide
  modified_base 31: mod_base = OTHER; note = 2'-O-methyl modified nucleotide
  modified_base 32: mod_base = OTHER; note = 2'-O-methyl modified nucleotide
  modified_base 33: mod_base = OTHER; note = 2'-O-methyl modified nucleotide
  modified_base 34: mod_base = OTHER; note = 2'-O-methyl modified nucleotide
  modified_base 35: mod_base = OTHER; note = 2'-O-methyl modified nucleotide
  modified_base 36: mod_base = OTHER; note = 2'-O-methyl modified nucleotide
  modified_base 37: mod_base = OTHER; note = 2'-O-methyl modified nucleotide
  modified_base 38: mod_base = OTHER; note = 2'-O-methyl modified nucleotide
  modified_base 39: mod_base = OTHER; note = 2'-O-methyl modified nucleotide
  modified_base 40: mod_base = OTHER; note = 2'-O-methyl modified nucleotide
  modified_base 69: mod_base = OTHER; note = 2'-O-methyl modified nucleotide
  modified_base 70: mod_base = OTHER; note = 2'-O-methyl modified nucleotide
  modified_base 71: mod_base = OTHER; note = 2'-O-methyl modified nucleotide
  modified_base 72: mod_base = OTHER; note = 2'-O-methyl modified nucleotide
  modified_base 73: mod_base = OTHER; note = 2'-O-methyl modified nucleotide
  modified_base 74: mod_base = OTHER; note = 2'-O-methyl modified nucleotide
  modified_base 75: mod_base = OTHER; note = 2'-O-methyl modified nucleotide
  modified_base 76: mod_base = OTHER; note = 2'-O-methyl modified nucleotide
  modified_base 77: mod_base = OTHER; note = 2'-O-methyl modified nucleotide
  modified_base 78: mod_base = OTHER; note = 2'-O-methyl modified nucleotide
  modified_base 79: mod_base = OTHER; note = 2'-O-methyl modified nucleotide
  modified_base 80: mod_base = OTHER; note = 2'-O-methyl modified nucleotide
  modified_base 81: mod_base = OTHER; note = 2'-O-methyl modified nucleotide
  modified_base 82: mod_base = OTHER; note = 2'-O-methyl modified nucleotide
  modified_base 83: mod_base = OTHER; note = 2'-O-methyl modified nucleotide
  modified_base 84: mod_base = OTHER; note = 2'-O-methyl modified nucleotide
  modified_base 85: mod_base = OTHER; note = 2'-O-methyl modified nucleotide
  modified_base 86: mod_base = OTHER; note = 2'-O-methyl modified nucleotide
  modified_base 87: mod_base = OTHER; note = 2'-O-methyl modified nucleotide
  modified_base 88: mod_base = OTHER; note = 2'-O-methyl modified nucleotide
  modified_base 89: mod_base = OTHER; note = 2'-O-methyl modified nucleotide
  modified_base 90: mod_base = OTHER; note = 2'-O-methyl modified nucleotide
  modified_base 91: mod_base = OTHER; note = 2'-O-methyl modified nucleotide
  modified_base 92: mod_base = OTHER; note = 2'-O-methyl modified nucleotide
  modified_base 93: mod_base = OTHER; note = 2'-O-methyl modified nucleotide
  modified_base 94: mod_base = OTHER; note = 2'-O-methyl modified nucleotide
  modified_base 95: mod_base = OTHER; note = 2'-O-methyl modified nucleotide
  modified_base 96: mod_base = OTHER; note = 2'-O-methyl modified nucleotide
  modified_base 121: mod_base = OTHER; note = Nucleotide with phosphorothioate linkage
  modified_base 122: mod_base = OTHER; note = 2'-O-methyl modified nucleotide with phosphorothioate linkage
  modified_base 123: mod_base = OTHER; note = 2'-O-methyl modified nucleotide with phosphorothioate linkage
  modified_base 124: mod_base = OTHER; note = 2'-O-methyl modified nucleotide
gagaatcaaaatcggtgaatgttttagagctagaaatagcaagttaaaataaggctagtccgttatcaacttgaaaaagtggcaccgagtcggtgcgtctgtctgcctatttgatgcaccgatt

SEQ ID NO: 16373 - RNA, 131 nt, synthetic construct
  source 1..131: mol_type = other RNA
  modified_base 1: mod_base = OTHER; note = 2'-O-methyl modified nucleotide with phosphorothioate linkage
  modified_base 2: mod_base = OTHER; note = 2'-O-methyl modified nucleotide with phosphorothioate linkage
  modified_base 3: mod_base = OTHER; note = 2'-O-methyl modified nucleotide with phosphorothioate linkage
  modified_base 29: mod_base = OTHER; note = 2'-O-methyl modified nucleotide
  modified_base 30: mod_base = OTHER; note = 2'-O-methyl modified nucleotide
  modified_base 31: mod_base = OTHER; note = 2'-O-methyl modified nucleotide
  modified_base 32: mod_base = OTHER; note = 2'-O-methyl modified nucleotide
  modified_base 33: mod_base = OTHER; note = 2'-O-methyl modified nucleotide
  modified_base 34: mod_base = OTHER; note = 2'-O-methyl modified nucleotide
  modified_base 35: mod_base = OTHER; note = 2'-O-methyl modified nucleotide
  modified_base 36: mod_base = OTHER; note = 2'-O-methyl modified nucleotide
  modified_base 37: mod_base = OTHER; note = 2'-O-methyl modified nucleotide
  modified_base 38: mod_base = OTHER; note = 2'-O-methyl modified nucleotide
  modified_base 39: mod_base = OTHER; note = 2'-O-methyl modified nucleotide
  modified_base 40: mod_base = OTHER; note = 2'-O-methyl modified nucleotide
  modified_base 69: mod_base = OTHER; note = 2'-O-methyl modified nucleotide
  modified_base 70: mod_base = OTHER; note = 2'-O-methyl modified nucleotide
  modified_base 71: mod_base = OTHER; note = 2'-O-methyl modified nucleotide
  modified_base 72: mod_base = OTHER; note = 2'-O-methyl modified nucleotide
  modified_base 73: mod_base = OTHER; note = 2'-O-methyl modified nucleotide
  modified_base 74: mod_base = OTHER; note = 2'-O-methyl modified nucleotide
  modified_base 75: mod_base = OTHER; note = 2'-O-methyl modified nucleotide
  modified_base 76: mod_base = OTHER; note = 2'-O-methyl modified nucleotide
  modified_base 77: mod_base = OTHER; note = 2'-O-methyl modified nucleotide
  modified_base 78: mod_base = OTHER; note = 2'-O-methyl modified nucleotide
  modified_base 79: mod_base = OTHER; note = 2'-O-methyl modified nucleotide
  modified_base 80: mod_base = OTHER; note = 2'-O-methyl modified nucleotide
  modified_base 81: mod_base = OTHER; note = 2'-O-methyl modified nucleotide
  modified_base 82: mod_base = OTHER; note = 2'-O-methyl modified nucleotide
  modified_base 83: mod_base = OTHER; note = 2'-O-methyl modified nucleotide
  modified_base 84: mod_base = OTHER; note = 2'-O-methyl modified nucleotide
  modified_base 85: mod_base = OTHER; note = 2'-O-methyl modified nucleotide
  modified_base 86: mod_base = OTHER; note = 2'-O-methyl modified nucleotide
  modified_base 87: mod_base = OTHER; note = 2'-O-methyl modified nucleotide
  modified_base 88: mod_base = OTHER; note = 2'-O-methyl modified nucleotide
  modified_base 89: mod_base = OTHER; note = 2'-O-methyl modified nucleotide
  modified_base 90: mod_base = OTHER; note = 2'-O-methyl modified nucleotide
  modified_base 91: mod_base = OTHER; note = 2'-O-methyl modified nucleotide
  modified_base 92: mod_base = OTHER; note = 2'-O-methyl modified nucleotide
  modified_base 93: mod_base = OTHER; note = 2'-O-methyl modified nucleotide
  modified_base 94: mod_base = OTHER; note = 2'-O-methyl modified nucleotide
  modified_base 95: mod_base = OTHER; note = 2'-O-methyl modified nucleotide
  modified_base 96: mod_base = OTHER; note = 2'-O-methyl modified nucleotide
  modified_base 128: mod_base = OTHER; note = Nucleotide with phosphorothioate linkage
  modified_base 129: mod_base = OTHER; note = 2'-O-methyl modified nucleotide with phosphorothioate linkage
  modified_base 130: mod_base = OTHER; note = 2'-O-methyl modified nucleotide with phosphorothioate linkage
  modified_base 131: mod_base = OTHER; note = 2'-O-methyl modified nucleotide
gagaatcaaaatcggtgaatgttttagagctagaaatagcaagttaaaataaggctagtccgttatcaacttgaaaaagtggcaccgagtcggtgcaagtctgtctgcctatttgatgcaccgattttgat

SEQ ID NO: 16374 - RNA, 130 nt, synthetic construct
  source 1..130: mol_type = other RNA
  modified_base 1: mod_base = OTHER; note = 2'-O-methyl modified nucleotide with phosphorothioate linkage
  modified_base 2: mod_base = OTHER; note = 2'-O-methyl modified nucleotide with phosphorothioate linkage
  modified_base 3: mod_base = OTHER; note = 2'-O-methyl modified nucleotide with phosphorothioate linkage
  modified_base 29: mod_base = OTHER; note = 2'-O-methyl modified nucleotide
  modified_base 30: mod_base = OTHER; note = 2'-O-methyl modified nucleotide
  modified_base 31: mod_base = OTHER; note = 2'-O-methyl modified nucleotide
  modified_base 32: mod_base = OTHER; note = 2'-O-methyl modified nucleotide
  modified_base 33: mod_base = OTHER; note = 2'-O-methyl modified nucleotide
  modified_base 34: mod_base = OTHER; note = 2'-O-methyl modified nucleotide
  modified_base 35: mod_base = OTHER; note = 2'-O-methyl modified nucleotide
  modified_base 36: mod_base = OTHER; note = 2'-O-methyl modified nucleotide
  modified_base 37: mod_base = OTHER; note = 2'-O-methyl modified nucleotide
  modified_base 38: mod_base = OTHER; note = 2'-O-methyl modified nucleotide
  modified_base 39: mod_base = OTHER; note = 2'-O-methyl modified nucleotide
  modified_base 40: mod_base = OTHER; note = 2'-O-methyl modified nucleotide
  modified_base 69: mod_base = OTHER; note = 2'-O-methyl modified nucleotide
  modified_base 70: mod_base = OTHER; note = 2'-O-methyl modified nucleotide
  modified_base 71: mod_base = OTHER; note = 2'-O-methyl modified nucleotide
  modified_base 72: mod_base = OTHER; note = 2'-O-methyl modified nucleotide
  modified_base 73: mod_base = OTHER; note = 2'-O-methyl modified nucleotide
  modified_base 74: mod_base = OTHER; note = 2'-O-methyl modified nucleotide
  modified_base 75: mod_base = OTHER; note = 2'-O-methyl modified nucleotide
  modified_base 76: mod_base = OTHER; note = 2'-O-methyl modified nucleotide
  modified_base 77: mod_base = OTHER; note = 2'-O-methyl modified nucleotide
  modified_base 78: mod_base = OTHER; note = 2'-O-methyl modified nucleotide
  modified_base 79: mod_base = OTHER; note = 2'-O-methyl modified nucleotide
  modified_base 80: mod_base = OTHER; note = 2'-O-methyl modified nucleotide
  modified_base 81: mod_base = OTHER; note = 2'-O-methyl modified nucleotide
  modified_base 82: mod_base = OTHER; note = 2'-O-methyl modified nucleotide
  modified_base 83: mod_base = OTHER; note = 2'-O-methyl modified nucleotide
  modified_base 84: mod_base = OTHER; note = 2'-O-methyl modified nucleotide
  modified_base 85: mod_base = OTHER; note = 2'-O-methyl modified nucleotide
  modified_base 86: mod_base = OTHER; note = 2'-O-methyl modified nucleotide
  modified_base 87: mod_base = OTHER; note = 2'-O-methyl modified nucleotide
  modified_base 88: mod_base = OTHER; note = 2'-O-methyl modified nucleotide
  modified_base 89: mod_base = OTHER; note = 2'-O-methyl modified nucleotide
  modified_base 90: mod_base = OTHER; note = 2'-O-methyl modified nucleotide
  modified_base 91: mod_base = OTHER; note = 2'-O-methyl modified nucleotide
  modified_base 92: mod_base = OTHER; note = 2'-O-methyl modified nucleotide
  modified_base 93: mod_base = OTHER; note = 2'-O-methyl modified nucleotide
  modified_base 94: mod_base = OTHER; note = 2'-O-methyl modified nucleotide
  modified_base 95: mod_base = OTHER; note = 2'-O-methyl modified nucleotide
  modified_base 96: mod_base = OTHER; note = 2'-O-methyl modified nucleotide
  modified_base 127: mod_base = OTHER; note = Nucleotide with phosphorothioate linkage
  modified_base 128: mod_base = OTHER; note = 2'-O-methyl modified nucleotide with phosphorothioate linkage
  modified_base 129: mod_base = OTHER; note = 2'-O-methyl modified nucleotide with phosphorothioate linkage
  modified_base 130: mod_base = OTHER; note = 2'-O-methyl modified nucleotide
gagaatcaaaatcggtgaatgttttagagctagaaatagcaagttaaaataaggctagtccgttatcaacttgaaaaagtggcaccgagtcggtgcaagtctgtctgcctatttgatgcaccgattttga

SEQ ID NO: 16375 - RNA, 129 nt, synthetic construct
  source 1..129: mol_type = other RNA
  modified_base 1: mod_base = OTHER; note = 2'-O-methyl modified nucleotide with phosphorothioate linkage
  modified_base 2: mod_base = OTHER; note = 2'-O-methyl modified nucleotide with phosphorothioate linkage
  modified_base 3: mod_base = OTHER; note = 2'-O-methyl modified nucleotide with phosphorothioate linkage
  modified_base 29: mod_base = OTHER; note = 2'-O-methyl modified nucleotide
  modified_base 30: mod_base = OTHER; note = 2'-O-methyl modified nucleotide
  modified_base 31: mod_base = OTHER; note = 2'-O-methyl modified nucleotide
  modified_base 32: mod_base = OTHER; note = 2'-O-methyl modified nucleotide
  modified_base 33: mod_base = OTHER; note = 2'-O-methyl modified nucleotide
  modified_base 34: mod_base = OTHER; note = 2'-O-methyl modified nucleotide
  modified_base 35: mod_base = OTHER; note = 2'-O-methyl modified nucleotide
  modified_base 36: mod_base = OTHER; note = 2'-O-methyl modified nucleotide
  modified_base 37: mod_base = OTHER; note = 2'-O-methyl modified nucleotide
  modified_base 38: mod_base = OTHER; note = 2'-O-methyl modified nucleotide
  modified_base 39: mod_base = OTHER; note = 2'-O-methyl modified nucleotide
  modified_base 40: mod_base = OTHER; note = 2'-O-methyl modified nucleotide
  modified_base 69: mod_base = OTHER; note = 2'-O-methyl modified nucleotide
  modified_base 70: mod_base = OTHER; note = 2'-O-methyl modified nucleotide
  modified_base 71: mod_base = OTHER; note = 2'-O-methyl modified nucleotide
  modified_base 72: mod_base = OTHER; note = 2'-O-methyl modified nucleotide
  modified_base 73: mod_base = OTHER; note = 2'-O-methyl modified nucleotide
  modified_base 74: mod_base = OTHER; note = 2'-O-methyl modified nucleotide
  modified_base 75: mod_base = OTHER; note = 2'-O-methyl modified nucleotide
  modified_base 76: mod_base = OTHER; note = 2'-O-methyl modified nucleotide
  modified_base 77: mod_base = OTHER; note = 2'-O-methyl modified nucleotide
  modified_base 78: mod_base = OTHER; note = 2'-O-methyl modified nucleotide
  modified_base 79: mod_base = OTHER; note = 2'-O-methyl modified nucleotide
  modified_base 80: mod_base = OTHER; note = 2'-O-methyl modified nucleotide
  modified_base 81: mod_base = OTHER; note = 2'-O-methyl modified nucleotide
  modified_base 82: mod_base = OTHER; note = 2'-O-methyl modified nucleotide
  modified_base 83: mod_base = OTHER; note = 2'-O-methyl modified nucleotide
  modified_base 84: mod_base = OTHER; note = 2'-O-methyl modified nucleotide
  modified_base 85: mod_base = OTHER; note = 2'-O-methyl modified nucleotide
  modified_base 86: mod_base = OTHER; note = 2'-O-methyl modified nucleotide
  modified_base 87: mod_base = OTHER; note = 2'-O-methyl modified nucleotide
  modified_base 88: mod_base = OTHER; note = 2'-O-methyl modified nucleotide
  modified_base 89: mod_base = OTHER; note = 2'-O-methyl modified nucleotide
  modified_base 90: mod_base = OTHER; note = 2'-O-methyl modified nucleotide
  modified_base 91: mod_base = OTHER; note = 2'-O-methyl modified nucleotide
  modified_base 92: mod_base = OTHER; note = 2'-O-methyl modified nucleotide
  modified_base 93: mod_base = OTHER; note = 2'-O-methyl modified nucleotide
  modified_base 94: mod_base = OTHER; note = 2'-O-methyl modified nucleotide
  modified_base 95: mod_base = OTHER; note = 2'-O-methyl modified nucleotide
  modified_base 96: mod_base = OTHER; note = 2'-O-methyl modified nucleotide
  modified_base 126: mod_base = OTHER; note = Nucleotide with phosphorothioate linkage
  modified_base 127: mod_base = OTHER; note = 2'-O-methyl modified nucleotide with phosphorothioate linkage
  modified_base 128: mod_base = OTHER; note = 2'-O-methyl modified nucleotide with phosphorothioate linkage
  modified_base 129: mod_base = OTHER; note = 2'-O-methyl modified nucleotide
gagaatcaaaatcggtgaatgttttagagctagaaatagcaagttaaaataaggctagtccgttatcaacttgaaaaagtggcaccgagtcggtgcaagtctgtctgcctatttgatgcaccgattttg

SEQ ID NO: 16376 - RNA, 128 nt, synthetic construct
  source 1..128: mol_type = other RNA
  modified_base 1: mod_base = OTHER; note = 2'-O-methyl modified nucleotide with phosphorothioate linkage
  modified_base 2: mod_base = OTHER; note = 2'-O-methyl modified nucleotide with phosphorothioate linkage
  modified_base 3: mod_base = OTHER; note = 2'-O-methyl modified nucleotide with phosphorothioate linkage
  modified_base 29: mod_base = OTHER; note = 2'-O-methyl modified nucleotide
  modified_base 30: mod_base = OTHER; note = 2'-O-methyl modified nucleotide
  modified_base 31: mod_base = OTHER; note = 2'-O-methyl modified nucleotide
  modified_base 32: mod_base = OTHER; note = 2'-O-methyl modified nucleotide
  modified_base 33: mod_base = OTHER; note = 2'-O-methyl modified nucleotide
  modified_base 34: mod_base = OTHER; note = 2'-O-methyl modified nucleotide
  modified_base 35: mod_base = OTHER; note = 2'-O-methyl modified nucleotide
  modified_base 36: mod_base = OTHER; note = 2'-O-methyl modified nucleotide
  modified_base 37: mod_base = OTHER; note = 2'-O-methyl modified nucleotide
  modified_base 38: mod_base = OTHER; note = 2'-O-methyl modified nucleotide
  modified_base 39: mod_base = OTHER; note = 2'-O-methyl modified nucleotide
  modified_base 40: mod_base = OTHER; note = 2'-O-methyl modified nucleotide
  modified_base 69: mod_base = OTHER; note = 2'-O-methyl modified nucleotide
  modified_base 70: mod_base = OTHER; note = 2'-O-methyl modified nucleotide
  modified_base 71: mod_base = OTHER; note = 2'-O-methyl modified nucleotide
  modified_base 72: mod_base = OTHER; note = 2'-O-methyl modified nucleotide
  modified_base 73: mod_base = OTHER; note = 2'-O-methyl modified nucleotide
  modified_base 74: mod_base = OTHER; note = 2'-O-methyl modified nucleotide
  modified_base 75: mod_base = OTHER; note = 2'-O-methyl modified nucleotide
  modified_base 76: mod_base = OTHER; note = 2'-O-methyl modified nucleotide
  modified_base 77: mod_base = OTHER; note = 2'-O-methyl modified nucleotide
  modified_base 78: mod_base = OTHER; note = 2'-O-methyl modified nucleotide
  modified_base 79: mod_base = OTHER; note = 2'-O-methyl modified nucleotide
  modified_base 80: mod_base = OTHER; note = 2'-O-methyl modified nucleotide
  modified_base 81: mod_base = OTHER; note = 2'-O-methyl modified nucleotide
  modified_base 82: mod_base = OTHER; note = 2'-O-methyl modified nucleotide
  modified_base 83: mod_base = OTHER; note = 2'-O-methyl modified nucleotide
  modified_base 84: mod_base = OTHER; note = 2'-O-methyl modified nucleotide
  modified_base 85: mod_base = OTHER; note = 2'-O-methyl modified nucleotide
  modified_base 86: mod_base = OTHER; note = 2'-O-methyl modified nucleotide
  modified_base 87: mod_base = OTHER; note = 2'-O-methyl modified nucleotide
  modified_base 88: mod_base = OTHER; note = 2'-O-methyl modified nucleotide
  modified_base 89: mod_base = OTHER; note = 2'-O-methyl modified nucleotide
  modified_base 90: mod_base = OTHER; note = 2'-O-methyl modified nucleotide
  modified_base 91: mod_base = OTHER; note = 2'-O-methyl modified nucleotide
  modified_base 92: mod_base = OTHER; note = 2'-O-methyl modified nucleotide
  modified_base 93: mod_base = OTHER; note = 2'-O-methyl modified nucleotide
  modified_base 94: mod_base = OTHER; note = 2'-O-methyl modified nucleotide
  modified_base 95: mod_base = OTHER; note = 2'-O-methyl modified nucleotide
  modified_base 96: mod_base = OTHER; note = 2'-O-methyl modified nucleotide
  modified_base 125: mod_base = OTHER; note = Nucleotide with phosphorothioate linkage
  modified_base 126: mod_base = OTHER; note = 2'-O-methyl modified nucleotide with phosphorothioate linkage
  modified_base 127: mod_base = OTHER; note = 2'-O-methyl modified nucleotide with phosphorothioate linkage
  modified_base 128: mod_base = OTHER; note = 2'-O-methyl modified nucleotide
gagaatcaaaatcggtgaatgttttagagctagaaatagcaagttaaaataaggctagtccgttatcaacttgaaaaagtggcaccgagtcggtgcaagtctgtctgcctatttgatgcaccgatttt

SEQ ID NO: 16377 - RNA, 127 nt, synthetic construct
  source 1..127: mol_type = other RNA
  modified_base 1: mod_base = OTHER; note = 2'-O-methyl modified nucleotide with phosphorothioate linkage
  modified_base 2: mod_base = OTHER; note = 2'-O-methyl modified nucleotide with phosphorothioate linkage
  modified_base 3: mod_base = OTHER; note = 2'-O-methyl modified nucleotide with phosphorothioate linkage
  modified_base 29: mod_base = OTHER; note = 2'-O-methyl modified nucleotide
  modified_base 30: mod_base = OTHER; note = 2'-O-methyl modified nucleotide
  modified_base 31: mod_base = OTHER; note = 2'-O-methyl modified nucleotide
  modified_base 32: mod_base = OTHER; note = 2'-O-methyl modified nucleotide
  modified_base 33: mod_base = OTHER; note = 2'-O-methyl modified nucleotide
  modified_base 34: mod_base = OTHER; note = 2'-O-methyl modified nucleotide
  modified_base 35: mod_base = OTHER; note = 2'-O-methyl modified nucleotide
  modified_base 36: mod_base = OTHER; note = 2'-O-methyl modified nucleotide
  modified_base 37: mod_base = OTHER; note = 2'-O-methyl modified nucleotide
  modified_base 38: mod_base = OTHER; note = 2'-O-methyl modified nucleotide
  modified_base 39: mod_base = OTHER; note = 2'-O-methyl modified nucleotide
  modified_base 40: mod_base = OTHER; note = 2'-O-methyl modified nucleotide
  modified_base 69: mod_base = OTHER; note = 2'-O-methyl modified nucleotide
  modified_base 70: mod_base = OTHER; note = 2'-O-methyl modified nucleotide
  modified_base 71: mod_base = OTHER; note = 2'-O-methyl modified nucleotide
  modified_base 72: mod_base = OTHER; note = 2'-O-methyl modified nucleotide
  modified_base 73: mod_base = OTHER; note = 2'-O-methyl modified nucleotide
  modified_base 74: mod_base = OTHER; note = 2'-O-methyl modified nucleotide
  modified_base 75: mod_base = OTHER; note = 2'-O-methyl modified nucleotide
  modified_base 76: mod_base = OTHER; note = 2'-O-methyl modified nucleotide
  modified_base 77: mod_base = OTHER; note = 2'-O-methyl modified nucleotide
  modified_base 78: mod_base = OTHER; note = 2'-O-methyl modified nucleotide
  modified_base 79: mod_base = OTHER; note = 2'-O-methyl modified nucleotide
  modified_base 80: mod_base = OTHER; note = 2'-O-methyl modified nucleotide
  modified_base 81: mod_base = OTHER; note = 2'-O-methyl modified nucleotide
  modified_base 82: mod_base = OTHER; note = 2'-O-methyl modified nucleotide
  modified_base 83: mod_base = OTHER; note = 2'-O-methyl modified nucleotide
  modified_base 84: mod_base = OTHER; note = 2'-O-methyl modified nucleotide
  modified_base 85: mod_base = OTHER; note = 2'-O-methyl modified nucleotide
  modified_base 86: mod_base = OTHER; note = 2'-O-methyl modified nucleotide
  modified_base 87: mod_base = OTHER; note = 2'-O-methyl modified nucleotide
  modified_base 88: mod_base = OTHER; note = 2'-O-methyl modified nucleotide
  modified_base 89: mod_base = OTHER; note = 2'-O-methyl modified nucleotide
  modified_base 90: mod_base = OTHER; note = 2'-O-methyl modified nucleotide
  modified_base 91: mod_base = OTHER; note = 2'-O-methyl modified nucleotide
  modified_base 92: mod_base = OTHER; note = 2'-O-methyl modified nucleotide
  modified_base 93: mod_base = OTHER; note = 2'-O-methyl modified nucleotide
  modified_base 94: mod_base = OTHER; note = 2'-O-methyl modified nucleotide
  modified_base 95: mod_base = OTHER; note = 2'-O-methyl modified nucleotide
  modified_base 96: mod_base = OTHER; note = 2'-O-methyl modified nucleotide
  modified_base 124: mod_base = OTHER; note = Nucleotide with phosphorothioate linkage
  modified_base 125: mod_base = OTHER; note = 2'-O-methyl modified nucleotide with phosphorothioate linkage
  modified_base 126: mod_base = OTHER; note = 2'-O-methyl modified nucleotide with phosphorothioate linkage
  modified_base 127: mod_base = OTHER; note = 2'-O-methyl modified nucleotide
gagaatcaaaatcggtgaatgttttagagctagaaatagcaagttaaaataaggctagtccgttatcaacttgaaaaagtggcaccgagtcggtgcaagtctgtctgcctatttgatgcaccgattt

SEQ ID NO: 16378 - RNA, 126 nt, synthetic construct
  source 1..126: mol_type = other RNA
  modified_base 1: mod_base = OTHER; note = 2'-O-methyl modified nucleotide with phosphorothioate linkage
  modified_base 2: mod_base = OTHER; note = 2'-O-methyl modified nucleotide with phosphorothioate linkage
  modified_base 3: mod_base = OTHER; note = 2'-O-methyl modified nucleotide with phosphorothioate linkage
  modified_base 29: mod_base = OTHER; note = 2'-O-methyl modified nucleotide
  modified_base 30: mod_base = OTHER; note = 2'-O-methyl modified nucleotide
  modified_base 31: mod_base = OTHER; note = 2'-O-methyl modified nucleotide
  modified_base 32: mod_base = OTHER; note = 2'-O-methyl modified nucleotide
  modified_base 33: mod_base = OTHER; note = 2'-O-methyl modified nucleotide
  modified_base 34: mod_base = OTHER; note = 2'-O-methyl modified nucleotide
  modified_base 35: mod_base = OTHER; note = 2'-O-methyl modified nucleotide
  modified_base 36: mod_base = OTHER; note = 2'-O-methyl modified nucleotide
  modified_base 37: mod_base = OTHER; note = 2'-O-methyl modified nucleotide
  modified_base 38: mod_base = OTHER; note = 2'-O-methyl modified nucleotide
  modified_base 39: mod_base = OTHER; note = 2'-O-methyl modified nucleotide
  modified_base 40: mod_base = OTHER; note = 2'-O-methyl modified nucleotide
  modified_base 69: mod_base = OTHER; note = 2'-O-methyl modified nucleotide
  modified_base 70: mod_base = OTHER; note = 2'-O-methyl modified nucleotide
  modified_base 71: mod_base = OTHER; note = 2'-O-methyl modified nucleotide
  modified_base 72: mod_base = OTHER; note = 2'-O-methyl modified nucleotide
  modified_base 73: mod_base = OTHER; note = 2'-O-methyl modified nucleotide
  modified_base 74: mod_base = OTHER; note = 2'-O-methyl modified nucleotide
  modified_base 75: mod_base = OTHER; note = 2'-O-methyl modified nucleotide
  modified_base 76: mod_base = OTHER; note = 2'-O-methyl modified nucleotide
  modified_base 77: mod_base = OTHER; note = 2'-O-methyl modified nucleotide
  modified_base 78: mod_base = OTHER; note = 2'-O-methyl modified nucleotide
  modified_base 79: mod_base = OTHER; note = 2'-O-methyl modified nucleotide
  modified_base 80: mod_base = OTHER; note = 2'-O-methyl modified nucleotide
  modified_base 81: mod_base = OTHER; note = 2'-O-methyl modified nucleotide
  modified_base 82: mod_base = OTHER; note = 2'-O-methyl modified nucleotide
  modified_base 83: mod_base = OTHER; note = 2'-O-methyl modified nucleotide
  modified_base 84: mod_base = OTHER; note = 2'-O-methyl modified nucleotide
  modified_base 85: mod_base = OTHER; note = 2'-O-methyl modified nucleotide
  modified_base 86: mod_base = OTHER; note = 2'-O-methyl modified nucleotide
  modified_base 87: mod_base = OTHER; note = 2'-O-methyl modified nucleotide
  modified_base 88: mod_base = OTHER; note = 2'-O-methyl modified nucleotide
  modified_base 89: mod_base = OTHER; note = 2'-O-methyl modified nucleotide
  modified_base 90: mod_base = OTHER; note = 2'-O-methyl modified nucleotide
  modified_base 91: mod_base = OTHER; note = 2'-O-methyl modified nucleotide
  modified_base 92: mod_base = OTHER; note = 2'-O-methyl modified nucleotide
  modified_base 93: mod_base = OTHER; note = 2'-O-methyl modified nucleotide
  modified_base 94: mod_base = OTHER; note = 2'-O-methyl modified nucleotide
  modified_base 95: mod_base = OTHER; note = 2'-O-methyl modified nucleotide
  modified_base 96: mod_base = OTHER; note = 2'-O-methyl modified nucleotide
  modified_base 123: mod_base = OTHER; note = Nucleotide with phosphorothioate linkage
  modified_base 124: mod_base = OTHER; note = 2'-O-methyl modified nucleotide with phosphorothioate linkage
  modified_base 125: mod_base = OTHER; note = 2'-O-methyl modified nucleotide with phosphorothioate linkage
  modified_base 126: mod_base = OTHER; note = 2'-O-methyl modified nucleotide
gagaatcaaaatcggtgaatgttttagagctagaaatagcaagttaaaataaggctagtccgttatcaacttgaaaaagtggcaccgagtcggtgcaagtctgtctgcctatttgatgcaccgatt

SEQ ID NO: 16379 - RNA, 119 nt, synthetic construct
  source 1..119: mol_type = other RNA
  modified_base 1: mod_base = OTHER; note = 2'-O-methyl modified nucleotide with phosphorothioate linkage
  modified_base 2: mod_base = OTHER; note = 2'-O-methyl modified nucleotide with phosphorothioate linkage
  modified_base 3: mod_base = OTHER; note = 2'-O-methyl modified nucleotide with phosphorothioate linkage
  modified_base 29: mod_base = OTHER; note = 2'-O-methyl modified nucleotide
  modified_base 30: mod_base = OTHER; note = 2'-O-methyl modified nucleotide
  modified_base 31: mod_base = OTHER; note = 2'-O-methyl modified nucleotide
  modified_base 32: mod_base = OTHER; note = 2'-O-methyl modified nucleotide
  modified_base 33: mod_base = OTHER; note = 2'-O-methyl modified nucleotide
  modified_base 34: mod_base = OTHER; note = 2'-O-methyl modified nucleotide
  modified_base 35: mod_base = OTHER; note = 2'-O-methyl modified nucleotide
  modified_base 36: mod_base = OTHER; note = 2'-O-methyl modified nucleotide
  modified_base 37: mod_base = OTHER; note = 2'-O-methyl modified nucleotide
  modified_base 38: mod_base = OTHER; note = 2'-O-methyl modified nucleotide
  modified_base 39: mod_base = OTHER; note = 2'-O-methyl modified nucleotide
  modified_base 40: mod_base = OTHER; note = 2'-O-methyl modified nucleotide
  modified_base 69: mod_base = OTHER; note = 2'-O-methyl modified nucleotide
  modified_base 70: mod_base = OTHER; note = 2'-O-methyl modified nucleotide
  modified_base 71: mod_base = OTHER; note = 2'-O-methyl modified nucleotide
  modified_base 72: mod_base = OTHER; note = 2'-O-methyl modified nucleotide
  modified_base 73: mod_base = OTHER; note = 2'-O-methyl modified nucleotide
  modified_base 74: mod_base = OTHER; note = 2'-O-methyl modified nucleotide
  modified_base 75: mod_base = OTHER; note = 2'-O-methyl modified nucleotide
  modified_base 76: mod_base = OTHER; note = 2'-O-methyl modified nucleotide
  modified_base 77: mod_base = OTHER; note = 2'-O-methyl modified nucleotide
  modified_base 78: mod_base = OTHER; note = 2'-O-methyl modified nucleotide
  modified_base 79: mod_base = OTHER; note = 2'-O-methyl modified nucleotide
  modified_base 80: mod_base = OTHER; note = 2'-O-methyl modified nucleotide
  modified_base 81: mod_base = OTHER; note = 2'-O-methyl modified nucleotide
  modified_base 82: mod_base = OTHER; note = 2'-O-methyl modified nucleotide
  modified_base 83: mod_base = OTHER; note = 2'-O-methyl modified nucleotide
  modified_base 84: mod_base = OTHER; note = 2'-O-methyl modified nucleotide
  modified_base 85: mod_base = OTHER; note = 2'-O-methyl modified nucleotide
  modified_base 86: mod_base = OTHER; note = 2'-O-methyl modified nucleotide
  modified_base 87: mod_base = OTHER; note = 2'-O-methyl modified nucleotide
  modified_base 88: mod_base = OTHER; note = 2'-O-methyl modified nucleotide
  modified_base 89: mod_base = OTHER; note = 2'-O-methyl modified nucleotide
  modified_base 90: mod_base = OTHER; note = 2'-O-methyl modified nucleotide
  modified_base 91: mod_base = OTHER; note = 2'-O-methyl modified nucleotide
  modified_base 92: mod_base = OTHER; note = 2'-O-methyl modified nucleotide
  modified_base 93: mod_base = OTHER; note = 2'-O-methyl modified nucleotide
  modified_base 94: mod_base = OTHER; note = 2'-O-methyl modified nucleotide
  modified_base 95: mod_base = OTHER; note = 2'-O-methyl modified nucleotide
  modified_base 96: mod_base = OTHER; note = 2'-O-methyl modified nucleotide
  modified_base 116: mod_base = OTHER; note = Nucleotide with phosphorothioate linkage
  modified_base 117: mod_base = OTHER; note = 2'-O-methyl modified nucleotide with phosphorothioate linkage
  modified_base 118: mod_base = OTHER; note = 2'-O-methyl modified nucleotide with phosphorothioate linkage
  modified_base 119: mod_base = OTHER; note = 2'-O-methyl modified nucleotide
gagaatcaaaatcggtgaatgttttagagctagaaatagcaagttaaaataaggctagtccgttatcaacttgaaaaagtggcaccgagtcggtgcctatttaacccaccgattttgat

SEQ ID NO: 16380 - RNA, 118 nt, synthetic construct
  source 1..118: mol_type = other RNA
  modified_base 1: mod_base = OTHER; note = 2'-O-methyl modified nucleotide with phosphorothioate linkage
  modified_base 2: mod_base = OTHER; note = 2'-O-methyl modified nucleotide with phosphorothioate linkage
  modified_base 3: mod_base = OTHER; note = 2'-O-methyl modified nucleotide with phosphorothioate linkage
  modified_base 29: mod_base = OTHER; note = 2'-O-methyl modified nucleotide
  modified_base 30: mod_base = OTHER; note = 2'-O-methyl modified nucleotide
  modified_base 31: mod_base = OTHER; note = 2'-O-methyl modified nucleotide
  modified_base 32: mod_base = OTHER; note = 2'-O-methyl modified nucleotide
  modified_base 33: mod_base = OTHER; note = 2'-O-methyl modified nucleotide
  modified_base 34: mod_base = OTHER; note = 2'-O-methyl modified nucleotide
  modified_base 35: mod_base = OTHER; note = 2'-O-methyl modified nucleotide
  modified_base 36: mod_base = OTHER; note = 2'-O-methyl modified nucleotide
  modified_base 37: mod_base = OTHER; note = 2'-O-methyl modified nucleotide
  modified_base 38: mod_base = OTHER; note = 2'-O-methyl modified nucleotide
  modified_base 39: mod_base = OTHER; note = 2'-O-methyl modified nucleotide
  modified_base 40: mod_base = OTHER; note = 2'-O-methyl modified nucleotide
  modified_base 69: mod_base = OTHER; note = 2'-O-methyl modified nucleotide
  modified_base 70: mod_base = OTHER; note = 2'-O-methyl modified nucleotide
  modified_base 71: mod_base = OTHER; note = 2'-O-methyl modified nucleotide
  modified_base 72: mod_base = OTHER; note = 2'-O-methyl modified nucleotide
  modified_base 73: mod_base = OTHER; note = 2'-O-methyl modified nucleotide
  modified_base 74: mod_base = OTHER; note = 2'-O-methyl modified nucleotide
  modified_base 75: mod_base = OTHER; note = 2'-O-methyl modified nucleotide
  modified_base 76: mod_base = OTHER; note = 2'-O-methyl modified nucleotide
  modified_base 77: mod_base = OTHER; note = 2'-O-methyl modified nucleotide
  modified_base 78: mod_base = OTHER; note = 2'-O-methyl modified nucleotide
  modified_base 79: mod_base = OTHER; note = 2'-O-methyl modified nucleotide
  modified_base 80: mod_base = OTHER; note = 2'-O-methyl modified nucleotide
  modified_base 81: mod_base = OTHER; note = 2'-O-methyl modified nucleotide
  modified_base 82: mod_base = OTHER; note = 2'-O-methyl modified nucleotide
  modified_base 83: mod_base = OTHER; note = 2'-O-methyl modified nucleotide
  modified_base 84: mod_base = OTHER; note = 2'-O-methyl modified nucleotide
  modified_base 85: mod_base = OTHER; note = 2'-O-methyl modified nucleotide
  modified_base 86: mod_base = OTHER; note = 2'-O-methyl modified nucleotide
  modified_base 87: mod_base = OTHER; note = 2'-O-methyl modified nucleotide
  modified_base 88: mod_base = OTHER; note = 2'-O-methyl modified nucleotide
  modified_base 89: mod_base = OTHER; note = 2'-O-methyl modified nucleotide
  modified_base 90: mod_base = OTHER; note = 2'-O-methyl modified nucleotide
  modified_base 91: mod_base = OTHER; note = 2'-O-methyl modified nucleotide
  modified_base 92: mod_base = OTHER; note = 2'-O-methyl modified nucleotide
  modified_base 93: mod_base = OTHER; note = 2'-O-methyl modified nucleotide
  modified_base 94: mod_base = OTHER; note = 2'-O-methyl modified nucleotide
  modified_base 95: mod_base = OTHER; note = 2'-O-methyl modified nucleotide
  modified_base 96: mod_base = OTHER; note = 2'-O-methyl modified nucleotide
  modified_base 115: mod_base = OTHER; note = Nucleotide with phosphorothioate linkage
  modified_base 116: mod_base = OTHER; note = 2'-O-methyl modified nucleotide with phosphorothioate linkage
  modified_base 117: mod_base = OTHER; note = 2'-O-methyl modified nucleotide with phosphorothioate linkage
  modified_base 118: mod_base = OTHER; note = 2'-O-methyl modified nucleotide
gagaatcaaaatcggtgaatgttttagagctagaaatagcaagttaaaataaggctagtccgttatcaacttgaaaaagtggcaccgagtcggtgcctatttaacccaccgattttga

SEQ ID NO: 16381 - RNA, 117 nt, synthetic construct
  source 1..117: mol_type = other RNA
  modified_base 1: mod_base = OTHER; note = 2'-O-methyl modified nucleotide with phosphorothioate linkage
  modified_base 2: mod_base = OTHER; note = 2'-O-methyl modified nucleotide with phosphorothioate linkage
  modified_base 3: mod_base = OTHER; note = 2'-O-methyl modified nucleotide with phosphorothioate linkage
  modified_base 29: mod_base = OTHER; note = 2'-O-methyl modified nucleotide
  modified_base 30: mod_base = OTHER; note = 2'-O-methyl modified nucleotide
  modified_base 31: mod_base = OTHER; note = 2'-O-methyl modified nucleotide
  modified_base 32: mod_base = OTHER; note = 2'-O-methyl modified nucleotide
  modified_base 33: mod_base = OTHER; note = 2'-O-methyl modified nucleotide
  modified_base 34: mod_base = OTHER; note = 2'-O-methyl modified nucleotide
  modified_base 35: mod_base = OTHER; note = 2'-O-methyl modified nucleotide
  modified_base 36: mod_base = OTHER; note = 2'-O-methyl modified nucleotide
  modified_base 37: mod_base = OTHER; note = 2'-O-methyl modified nucleotide
  modified_base 38: mod_base = OTHER; note = 2'-O-methyl modified nucleotide
  modified_base 39: mod_base = OTHER; note = 2'-O-methyl modified nucleotide
  modified_base 40: mod_base = OTHER; note = 2'-O-methyl modified nucleotide
  modified_base 69: mod_base = OTHER; note = 2'-O-methyl modified nucleotide
  modified_base 70: mod_base = OTHER; note = 2'-O-methyl modified nucleotide
  modified_base 71: mod_base = OTHER; note = 2'-O-methyl modified nucleotide
  modified_base 72: mod_base = OTHER; note = 2'-O-methyl modified nucleotide
  modified_base 73: mod_base = OTHER; note = 2'-O-methyl modified nucleotide
  modified_base 74: mod_base = OTHER; note = 2'-O-methyl modified nucleotide
  modified_base 75: mod_base = OTHER; note = 2'-O-methyl modified nucleotide
  modified_base 76: mod_base = OTHER; note = 2'-O-methyl modified nucleotide
  modified_base 77: mod_base = OTHER; note = 2'-O-methyl modified nucleotide
  modified_base 78: mod_base = OTHER; note = 2'-O-methyl modified nucleotide
  modified_base 79: mod_base = OTHER; note = 2'-O-methyl modified nucleotide
  modified_base 80: mod_base = OTHER; note = 2'-O-methyl modified nucleotide
  modified_base 81: mod_base = OTHER; note = 2'-O-methyl modified nucleotide
  modified_base 82: mod_base = OTHER; note = 2'-O-methyl modified nucleotide
  modified_base 83: mod_base = OTHER; note = 2'-O-methyl modified nucleotide
  modified_base 84: mod_base = OTHER; note = 2'-O-methyl modified nucleotide
  modified_base 85: mod_base = OTHER; note = 2'-O-methyl modified nucleotide
  modified_base 86: mod_base = OTHER; note = 2'-O-methyl modified nucleotide
  modified_base 87: mod_base = OTHER; note = 2'-O-methyl modified nucleotide
  modified_base 88: mod_base = OTHER; note = 2'-O-methyl modified nucleotide
  modified_base 89: mod_base = OTHER; note = 2'-O-methyl modified nucleotide
  modified_base 90: mod_base = OTHER; note = 2'-O-methyl modified nucleotide
  modified_base 91: mod_base = OTHER; note = 2'-O-methyl modified nucleotide
  modified_base 92: mod_base = OTHER; note = 2'-O-methyl modified nucleotide
  modified_base 93: mod_base = OTHER; note = 2'-O-methyl modified nucleotide
  modified_base 94: mod_base = OTHER; note = 2'-O-methyl modified nucleotide
  modified_base 95: mod_base = OTHER; note = 2'-O-methyl modified nucleotide
  modified_base 96: mod_base = OTHER; note = 2'-O-methyl modified nucleotide
  modified_base 114: mod_base = OTHER; note = Nucleotide with phosphorothioate linkage
  modified_base 115: mod_base = OTHER; note = 2'-O-methyl modified nucleotide with phosphorothioate linkage
  modified_base 116: mod_base = OTHER; note = 2'-O-methyl modified nucleotide with phosphorothioate linkage
  modified_base 117: mod_base = OTHER; note = 2'-O-methyl modified nucleotide
gagaatcaaaatcggtgaatgttttagagctagaaatagcaagttaaaataaggctagtccgttatcaacttgaaaaagtggcaccgagtcggtgcctatttaacccaccgattttg

SEQ ID NO: 16382 - RNA, 116 nt, synthetic construct
  source 1..116: mol_type = other RNA
  modified_base 1: mod_base = OTHER; note = 2'-O-methyl modified nucleotide with phosphorothioate linkage
  modified_base 2: mod_base = OTHER; note = 2'-O-methyl modified nucleotide with phosphorothioate linkage
  modified_base 3: mod_base = OTHER; note = 2'-O-methyl modified nucleotide with phosphorothioate linkage
  modified_base 29: mod_base = OTHER; note = 2'-O-methyl modified nucleotide
  modified_base 30: mod_base = OTHER; note = 2'-O-methyl modified nucleotide
  modified_base 31: mod_base = OTHER; note = 2'-O-methyl modified nucleotide
  modified_base 32: mod_base = OTHER; note = 2'-O-methyl modified nucleotide
  modified_base 33: mod_base = OTHER; note = 2'-O-methyl modified nucleotide
  modified_base 34: mod_base = OTHER; note = 2'-O-methyl modified nucleotide
  modified_base 35: mod_base = OTHER; note = 2'-O-methyl modified nucleotide
  modified_base 36: mod_base = OTHER; note = 2'-O-methyl modified nucleotide
  modified_base 37: mod_base = OTHER; note = 2'-O-methyl modified nucleotide
  modified_base 38: mod_base = OTHER; note = 2'-O-methyl modified nucleotide
  modified_base 39: mod_base = OTHER; note = 2'-O-methyl modified nucleotide
  modified_base 40: mod_base = OTHER; note = 2'-O-methyl modified nucleotide
  modified_base 69: mod_base = OTHER; note = 2'-O-methyl modified nucleotide
  modified_base 70: mod_base = OTHER; note = 2'-O-methyl modified nucleotide
  modified_base 71: mod_base = OTHER; note = 2'-O-methyl modified nucleotide
  modified_base 72: mod_base = OTHER; note = 2'-O-methyl modified nucleotide
  modified_base 73: mod_base = OTHER; note = 2'-O-methyl modified nucleotide
  modified_base 74: mod_base = OTHER; note = 2'-O-methyl modified nucleotide
  modified_base 75: mod_base = OTHER; note = 2'-O-methyl modified nucleotide
  modified_base 76: mod_base = OTHER; note = 2'-O-methyl modified nucleotide
  modified_base 77: mod_base = OTHER; note = 2'-O-methyl modified nucleotide
  modified_base 78: mod_base = OTHER; note = 2'-O-methyl modified nucleotide
  modified_base 79: mod_base = OTHER; note = 2'-O-methyl modified nucleotide
  modified_base 80: mod_base = OTHER; note = 2'-O-methyl modified nucleotide
  modified_base 81: mod_base = OTHER; note = 2'-O-methyl modified nucleotide
  modified_base 82: mod_base = OTHER; note = 2'-O-methyl modified nucleotide
  modified_base 83: mod_base = OTHER; note = 2'-O-methyl modified nucleotide
  modified_base 84: mod_base = OTHER; note = 2'-O-methyl modified nucleotide
  modified_base 85: mod_base = OTHER; note = 2'-O-methyl modified nucleotide
  modified_base 86: mod_base = OTHER; note = 2'-O-methyl modified nucleotide
  modified_base 87: mod_base = OTHER; note = 2'-O-methyl modified nucleotide
  modified_base 88: mod_base = OTHER; note = 2'-O-methyl modified nucleotide
  modified_base 89: mod_base = OTHER; note = 2'-O-methyl modified nucleotide
  modified_base 90: mod_base = OTHER; note = 2'-O-methyl modified nucleotide
  modified_base 91: mod_base = OTHER; note = 2'-O-methyl modified nucleotide
  modified_base 92: mod_base = OTHER; note = 2'-O-methyl modified nucleotide
  modified_base 93: mod_base = OTHER; note = 2'-O-methyl modified nucleotide
  modified_base 94: mod_base = OTHER; note = 2'-O-methyl modified nucleotide
  modified_base 95: mod_base = OTHER; note = 2'-O-methyl modified nucleotide
  modified_base 96: mod_base = OTHER; note = 2'-O-methyl modified nucleotide
  modified_base 113: mod_base = OTHER; note = Nucleotide with phosphorothioate linkage
  modified_base 114: mod_base = OTHER; note = 2'-O-methyl modified nucleotide with phosphorothioate linkage
  modified_base 115: mod_base = OTHER; note = 2'-O-methyl modified nucleotide with phosphorothioate linkage
  modified_base 116: mod_base = OTHER; note = 2'-O-methyl modified nucleotide
gagaatcaaaatcggtgaatgttttagagctagaaatagcaagttaaaataaggctagtccgttatcaacttgaaaaagtggcaccgagtcggtgcctatttaacccaccgatttt

SEQ ID NO: 16383 - RNA, 115 nt, synthetic construct
  source 1..115: mol_type = other RNA
  modified_base 1: mod_base = OTHER; note = 2'-O-methyl modified nucleotide with phosphorothioate linkage
  modified_base 2: mod_base = OTHER; note = 2'-O-methyl modified nucleotide with phosphorothioate linkage
  modified_base 3: mod_base = OTHER; note = 2'-O-methyl modified nucleotide with phosphorothioate linkage
  modified_base 29: mod_base = OTHER; note = 2'-O-methyl modified nucleotide
  modified_base 30: mod_base = OTHER; note = 2'-O-methyl modified nucleotide
  modified_base 31: mod_base = OTHER; note = 2'-O-methyl modified nucleotide
  modified_base 32: mod_base = OTHER; note = 2'-O-methyl modified nucleotide
  modified_base 33: mod_base = OTHER; note = 2'-O-methyl modified nucleotide
  modified_base 34: mod_base = OTHER; note = 2'-O-methyl modified nucleotide
  modified_base 35: mod_base = OTHER; note = 2'-O-methyl modified nucleotide
  modified_base 36: mod_base = OTHER; note = 2'-O-methyl modified nucleotide
  modified_base 37: mod_base = OTHER; note = 2'-O-methyl modified nucleotide
  modified_base 38: mod_base = OTHER; note = 2'-O-methyl modified nucleotide
  modified_base 39: mod_base = OTHER; note = 2'-O-methyl modified nucleotide
  modified_base 40: mod_base = OTHER; note = 2'-O-methyl modified nucleotide
  modified_base 69: mod_base = OTHER; note = 2'-O-methyl modified nucleotide
  modified_base 70: mod_base = OTHER; note = 2'-O-methyl modified nucleotide
  modified_base 71: mod_base = OTHER; note = 2'-O-methyl modified nucleotide
  modified_base 72: mod_base = OTHER; note = 2'-O-methyl modified nucleotide
  modified_base 73: mod_base = OTHER; note = 2'-O-methyl modified nucleotide
  modified_base 74: mod_base = OTHER; note = 2'-O-methyl modified nucleotide
  modified_base 75: mod_base = OTHER; note = 2'-O-methyl modified nucleotide
  modified_base 76: mod_base = OTHER; note = 2'-O-methyl modified nucleotide
  modified_base 77: mod_base = OTHER; note = 2'-O-methyl modified nucleotide
  modified_base 78: mod_base = OTHER; note = 2'-O-methyl modified nucleotide
  modified_base 79: mod_base = OTHER; note = 2'-O-methyl modified nucleotide
  modified_base 80: mod_base = OTHER; note = 2'-O-methyl modified nucleotide
  modified_base 81: mod_base = OTHER; note = 2'-O-methyl modified nucleotide
  modified_base 82: mod_base = OTHER; note = 2'-O-methyl modified nucleotide
  modified_base 83: mod_base = OTHER; note = 2'-O-methyl modified nucleotide
  modified_base 84: mod_base = OTHER; note = 2'-O-methyl modified nucleotide
  modified_base 85: mod_base = OTHER; note = 2'-O-methyl modified nucleotide
  modified_base 86: mod_base = OTHER; note = 2'-O-methyl modified nucleotide
  modified_base 87: mod_base = OTHER; note = 2'-O-methyl modified nucleotide
  modified_base 88: mod_base = OTHER; note = 2'-O-methyl modified nucleotide
  modified_base 89: mod_base = OTHER; note = 2'-O-methyl modified nucleotide
  modified_base 90: mod_base = OTHER; note = 2'-O-methyl modified nucleotide
  modified_base 91: mod_base = OTHER; note = 2'-O-methyl modified nucleotide
  modified_base 92: mod_base = OTHER; note = 2'-O-methyl modified nucleotide
  modified_base 93: mod_base = OTHER; note = 2'-O-methyl modified nucleotide
  modified_base 94: mod_base = OTHER; note = 2'-O-methyl modified nucleotide
  modified_base 95: mod_base = OTHER; note = 2'-O-methyl modified nucleotide
  modified_base 96: mod_base = OTHER; note = 2'-O-methyl modified nucleotide
  modified_base 112: mod_base = OTHER; note = Nucleotide with phosphorothioate linkage
  modified_base 113: mod_base = OTHER; note = 2'-O-methyl modified nucleotide with phosphorothioate linkage
  modified_base 114: mod_base = OTHER; note = 2'-O-methyl modified nucleotide with phosphorothioate linkage
  modified_base 115: mod_base = OTHER; note = 2'-O-methyl modified nucleotide
gagaatcaaaatcggtgaatgttttagagctagaaatagcaagttaaaataaggctagtccgttatcaacttgaaaaagtggcaccgagtcggtgcctatttaacccaccgattt

SEQ ID NO: 16384 - RNA, 114 nt, synthetic construct
  source 1..114: mol_type = other RNA
  modified_base 1: mod_base = OTHER; note = 2'-O-methyl modified nucleotide with phosphorothioate linkage
  modified_base 2: mod_base = OTHER; note = 2'-O-methyl modified nucleotide with phosphorothioate linkage
  modified_base 3: mod_base = OTHER; note = 2'-O-methyl modified nucleotide with phosphorothioate linkage
  modified_base 29: mod_base = OTHER; note = 2'-O-methyl modified nucleotide
  modified_base 30: mod_base = OTHER; note = 2'-O-methyl modified nucleotide
  modified_base 31: mod_base = OTHER; note = 2'-O-methyl modified nucleotide
  modified_base 32: mod_base = OTHER; note = 2'-O-methyl modified nucleotide
  modified_base 33: mod_base = OTHER; note = 2'-O-methyl modified nucleotide
  modified_base 34: mod_base = OTHER; note = 2'-O-methyl modified nucleotide
  modified_base 35: mod_base = OTHER; note = 2'-O-methyl modified nucleotide
  modified_base 36: mod_base = OTHER; note = 2'-O-methyl modified nucleotide
  modified_base 37: mod_base = OTHER; note = 2'-O-methyl modified nucleotide
  modified_base 38: mod_base = OTHER; note = 2'-O-methyl modified nucleotide
  modified_base 39: mod_base = OTHER; note = 2'-O-methyl modified nucleotide
  modified_base 40: mod_base = OTHER; note = 2'-O-methyl modified nucleotide
  modified_base 69: mod_base = OTHER; note = 2'-O-methyl modified nucleotide
  modified_base 70: mod_base = OTHER; note = 2'-O-methyl modified nucleotide
  modified_base 71: mod_base = OTHER; note = 2'-O-methyl modified nucleotide
  modified_base 72: mod_base = OTHER; note = 2'-O-methyl modified nucleotide
  modified_base 73: mod_base = OTHER; note = 2'-O-methyl modified nucleotide
  modified_base 74: mod_base = OTHER; note = 2'-O-methyl modified nucleotide
  modified_base 75: mod_base = OTHER; note = 2'-O-methyl modified nucleotide
  modified_base 76: mod_base = OTHER; note = 2'-O-methyl modified nucleotide
  modified_base 77: mod_base = OTHER; note = 2'-O-methyl modified nucleotide
  modified_base 78: mod_base = OTHER; note = 2'-O-methyl modified nucleotide
  modified_base 79: mod_base = OTHER; note = 2'-O-methyl modified nucleotide
  modified_base 80: mod_base = OTHER; note = 2'-O-methyl modified nucleotide
  modified_base 81: mod_base = OTHER; note = 2'-O-methyl modified nucleotide
  modified_base 82: mod_base = OTHER; note = 2'-O-methyl modified nucleotide
  modified_base 83: mod_base = OTHER; note = 2'-O-methyl modified nucleotide
  modified_base 84: mod_base = OTHER; note = 2'-O-methyl modified nucleotide
  modified_base 85: mod_base = OTHER; note = 2'-O-methyl modified nucleotide
  modified_base 86: mod_base = OTHER; note = 2'-O-methyl modified nucleotide
  modified_base 87: mod_base = OTHER; note = 2'-O-methyl modified nucleotide
  modified_base 88: mod_base = OTHER; note = 2'-O-methyl modified nucleotide
  modified_base 89: mod_base = OTHER; note = 2'-O-methyl modified nucleotide
  modified_base 90: mod_base = OTHER; note = 2'-O-methyl modified nucleotide
  modified_base 91: mod_base = OTHER; note = 2'-O-methyl modified nucleotide
  modified_base 92: mod_base = OTHER; note = 2'-O-methyl modified nucleotide
  modified_base 93: mod_base = OTHER; note = 2'-O-methyl modified nucleotide
  modified_base 94: mod_base = OTHER; note = 2'-O-methyl modified nucleotide
  modified_base 95: mod_base = OTHER; note = 2'-O-methyl modified nucleotide
  modified_base 96: mod_base = OTHER; note = 2'-O-methyl modified nucleotide
  modified_base 111: mod_base = OTHER; note = Nucleotide with phosphorothioate linkage
  modified_base 112: mod_base = OTHER; note = 2'-O-methyl modified nucleotide with phosphorothioate linkage
  modified_base 113: mod_base = OTHER; note = 2'-O-methyl modified nucleotide with phosphorothioate linkage
  modified_base 114: mod_base = OTHER; note = 2'-O-methyl modified nucleotide
gagaatcaaaatcggtgaatgttttagagctagaaatagcaagttaaaataaggctagtccgttatcaacttgaaaaagtggcaccgagtcggtgcctatttaacccaccgatt

SEQ ID NO: 16385 - RNA, 121 nt, synthetic construct
  source 1..121: mol_type = other RNA
  modified_base 1: mod_base = OTHER; note = 2'-O-methyl modified nucleotide with phosphorothioate linkage
  modified_base 2: mod_base = OTHER; note = 2'-O-methyl modified nucleotide with phosphorothioate linkage
  modified_base 3: mod_base = OTHER; note = 2'-O-methyl modified nucleotide with phosphorothioate linkage
  modified_base 29: mod_base = OTHER; note = 2'-O-methyl modified nucleotide
  modified_base 30: mod_base = OTHER; note = 2'-O-methyl modified nucleotide
  modified_base 31: mod_base = OTHER; note = 2'-O-methyl modified nucleotide
  modified_base 32: mod_base = OTHER; note = 2'-O-methyl modified nucleotide
  modified_base 33: mod_base = OTHER; note = 2'-O-methyl modified nucleotide
  modified_base 34: mod_base = OTHER; note = 2'-O-methyl modified nucleotide
  modified_base 35: mod_base = OTHER; note = 2'-O-methyl modified nucleotide
  modified_base 36: mod_base = OTHER; note = 2'-O-methyl modified nucleotide
  modified_base 37: mod_base = OTHER; note = 2'-O-methyl modified nucleotide
  modified_base 38: mod_base = OTHER; note = 2'-O-methyl modified nucleotide
  modified_base 39: mod_base = OTHER; note = 2'-O-methyl modified nucleotide
  modified_base 40: mod_base = OTHER; note = 2'-O-methyl modified nucleotide
  modified_base 69: mod_base = OTHER; note = 2'-O-methyl modified nucleotide
  modified_base 70: mod_base = OTHER; note = 2'-O-methyl modified nucleotide
  modified_base 71: mod_base = OTHER; note = 2'-O-methyl modified nucleotide
  modified_base 72: mod_base = OTHER; note = 2'-O-methyl modified nucleotide
  modified_base 73: mod_base = OTHER; note = 2'-O-methyl modified nucleotide
  modified_base 74: mod_base = OTHER; note = 2'-O-methyl modified nucleotide
  modified_base 75: mod_base = OTHER; note = 2'-O-methyl modified nucleotide
  modified_base 76: mod_base = OTHER; note = 2'-O-methyl modified nucleotide
  modified_base 77: mod_base = OTHER; note = 2'-O-methyl modified nucleotide
  modified_base 78: mod_base = OTHER; note = 2'-O-methyl modified nucleotide
  modified_base 79: mod_base = OTHER; note = 2'-O-methyl modified nucleotide
  modified_base 80: mod_base = OTHER; note = 2'-O-methyl modified nucleotide
  modified_base 81: mod_base = OTHER; note = 2'-O-methyl modified nucleotide
  modified_base 82: mod_base = OTHER; note = 2'-O-methyl modified nucleotide
  modified_base 83: mod_base = OTHER; note = 2'-O-methyl modified nucleotide
  modified_base 84: mod_base = OTHER; note = 2'-O-methyl modified nucleotide
  modified_base 85: mod_base = OTHER; note = 2'-O-methyl modified nucleotide
  modified_base 86: mod_base = OTHER; note = 2'-O-methyl modified nucleotide
  modified_base 87: mod_base = OTHER; note = 2'-O-methyl modified nucleotide
  modified_base 88: mod_base = OTHER; note = 2'-O-methyl modified nucleotide
  modified_base 89: mod_base = OTHER; note = 2'-O-methyl modified nucleotide
  modified_base 90: mod_base = OTHER; note = 2'-O-methyl modified nucleotide
  modified_base 91: mod_base = OTHER; note = 2'-O-methyl modified nucleotide
  modified_base 92: mod_base = OTHER; note = 2'-O-methyl modified nucleotide
  modified_base 93: mod_base = OTHER; note = 2'-O-methyl modified nucleotide
  modified_base 94: mod_base = OTHER; note = 2'-O-methyl modified nucleotide
  modified_base 95: mod_base = OTHER; note = 2'-O-methyl modified nucleotide
  modified_base 96: mod_base = OTHER; note = 2'-O-methyl modified nucleotide
  modified_base 118: mod_base = OTHER; note = Nucleotide with phosphorothioate linkage
  modified_base 119: mod_base = OTHER; note = 2'-O-methyl modified nucleotide with phosphorothioate linkage
  modified_base 120: mod_base = OTHER; note = 2'-O-methyl modified nucleotide with phosphorothioate linkage
  modified_base 121: mod_base = OTHER; note = 2'-O-methyl modified nucleotide
gagaatcaaaatcggtgaatgttttagagctagaaatagcaagttaaaataaggctagtccgttatcaacttgaaaaagtggcaccgagtcggtgcgcctatttaacccaccgattttgat

SEQ ID NO: 16386 - RNA, 120 nt, synthetic construct
  source 1..120: mol_type = other RNA
  modified_base 1: mod_base = OTHER; note = 2'-O-methyl modified nucleotide with phosphorothioate linkage
  modified_base 2: mod_base = OTHER; note = 2'-O-methyl modified nucleotide with phosphorothioate linkage
  modified_base 3: mod_base = OTHER; note = 2'-O-methyl modified nucleotide with phosphorothioate linkage
  modified_base 29: mod_base = OTHER; note = 2'-O-methyl modified nucleotide
  modified_base 30: mod_base = OTHER; note = 2'-O-methyl modified nucleotide
  modified_base 31: mod_base = OTHER; note = 2'-O-methyl modified nucleotide
  modified_base 32: mod_base = OTHER; note = 2'-O-methyl modified nucleotide
  modified_base 33: mod_base = OTHER; note = 2'-O-methyl modified nucleotide
  modified_base 34: mod_base = OTHER; note = 2'-O-methyl modified nucleotide
  modified_base 35: mod_base = OTHER; note = 2'-O-methyl modified nucleotide
  modified_base 36: mod_base = OTHER; note = 2'-O-methyl modified nucleotide
  modified_base 37: mod_base = OTHER; note = 2'-O-methyl modified nucleotide
  modified_base 38: mod_base = OTHER; note = 2'-O-methyl modified nucleotide
  modified_base 39: mod_base = OTHER; note = 2'-O-methyl modified nucleotide
  modified_base 40: mod_base = OTHER; note = 2'-O-methyl modified nucleotide
  modified_base 69: mod_base = OTHER; note = 2'-O-methyl modified nucleotide
  modified_base 70: mod_base = OTHER; note = 2'-O-methyl modified nucleotide
  modified_base 71: mod_base = OTHER; note = 2'-O-methyl modified nucleotide
  modified_base 72: mod_base = OTHER; note = 2'-O-methyl modified nucleotide
  modified_base 73: mod_base = OTHER; note = 2'-O-methyl modified nucleotide
  modified_base 74: mod_base = OTHER; note = 2'-O-methyl modified nucleotide
  modified_base 75: mod_base = OTHER; note = 2'-O-methyl modified nucleotide
  modified_base 76: mod_base = OTHER; note = 2'-O-methyl modified nucleotide
  modified_base 77: mod_base = OTHER; note = 2'-O-methyl modified nucleotide
  modified_base 78: mod_base = OTHER; note = 2'-O-methyl modified nucleotide
  modified_base 79: mod_base = OTHER; note = 2'-O-methyl modified nucleotide
  modified_base 80: mod_base = OTHER; note = 2'-O-methyl modified nucleotide
  modified_base 81: mod_base = OTHER; note = 2'-O-methyl modified nucleotide
  modified_base 82: mod_base = OTHER; note = 2'-O-methyl modified nucleotide
  modified_base 83: mod_base = OTHER; note = 2'-O-methyl modified nucleotide
  modified_base 84: mod_base = OTHER; note = 2'-O-methyl modified nucleotide
  modified_base 85: mod_base = OTHER; note = 2'-O-methyl modified nucleotide
  modified_base 86: mod_base = OTHER; note = 2'-O-methyl modified nucleotide
  modified_base 87: mod_base = OTHER; note = 2'-O-methyl modified nucleotide
  modified_base 88: mod_base = OTHER; note = 2'-O-methyl modified nucleotide
  modified_base 89: mod_base = OTHER; note = 2'-O-methyl modified nucleotide
  modified_base 90: mod_base = OTHER; note = 2'-O-methyl modified nucleotide
  modified_base 91: mod_base = OTHER; note = 2'-O-methyl modified nucleotide
  modified_base 92: mod_base = OTHER; note = 2'-O-methyl modified nucleotide
  modified_base 93: mod_base = OTHER; note = 2'-O-methyl modified nucleotide
  modified_base 94: mod_base = OTHER; note = 2'-O-methyl modified nucleotide
  modified_base 95: mod_base = OTHER; note = 2'-O-methyl modified nucleotide
  modified_base 96: mod_base = OTHER; note = 2'-O-methyl modified nucleotide
  modified_base 117: mod_base = OTHER; note = Nucleotide with phosphorothioate linkage
  modified_base 118: mod_base = OTHER; note = 2'-O-methyl modified nucleotide with phosphorothioate linkage
  modified_base 119: mod_base = OTHER; note = 2'-O-methyl modified nucleotide with phosphorothioate linkage
  modified_base 120: mod_base = OTHER; note = 2'-O-methyl modified nucleotide
gagaatcaaaatcggtgaatgttttagagctagaaatagcaagttaaaataaggctagtccgttatcaacttgaaaaagtggcaccgagtcggtgcgcctatttaacccaccgattttga

SEQ ID NO: 16387 - RNA, 119 nt, synthetic construct
  source 1..119: mol_type = other RNA
  modified_base 1: mod_base = OTHER; note = 2'-O-methyl modified nucleotide with phosphorothioate linkage
  modified_base 2: mod_base = OTHER; note = 2'-O-methyl modified nucleotide with phosphorothioate linkage
  modified_base 3: mod_base = OTHER; note = 2'-O-methyl modified nucleotide with phosphorothioate linkage
  modified_base 29: mod_base = OTHER; note = 2'-O-methyl modified nucleotide
  modified_base 30: mod_base = OTHER; note = 2'-O-methyl modified nucleotide
  modified_base 31: mod_base = OTHER; note = 2'-O-methyl modified nucleotide
  modified_base 32: mod_base = OTHER; note = 2'-O-methyl modified nucleotide
  modified_base 33: mod_base = OTHER; note = 2'-O-methyl modified nucleotide
  modified_base 34: mod_base = OTHER; note = 2'-O-methyl modified nucleotide
  modified_base 35: mod_base = OTHER; note = 2'-O-methyl modified nucleotide
  modified_base 36: mod_base = OTHER; note = 2'-O-methyl modified nucleotide
  modified_base 37: mod_base = OTHER; note = 2'-O-methyl modified nucleotide
  modified_base 38: mod_base = OTHER; note = 2'-O-methyl modified nucleotide
  modified_base 39: mod_base = OTHER; note = 2'-O-methyl modified nucleotide
  modified_base 40: mod_base = OTHER; note = 2'-O-methyl modified nucleotide
  modified_base 69: mod_base = OTHER; note = 2'-O-methyl modified nucleotide
  modified_base 70: mod_base = OTHER; note = 2'-O-methyl modified nucleotide
  modified_base 71: mod_base = OTHER; note = 2'-O-methyl modified nucleotide
  modified_base 72: mod_base = OTHER; note = 2'-O-methyl modified nucleotide
  modified_base 73: mod_base = OTHER; note = 2'-O-methyl modified nucleotide
  modified_base 74: mod_base = OTHER; note = 2'-O-methyl modified nucleotide
  modified_base 75: mod_base = OTHER; note = 2'-O-methyl modified nucleotide
  modified_base 76: mod_base = OTHER; note = 2'-O-methyl modified nucleotide
  modified_base 77: mod_base = OTHER; note = 2'-O-methyl modified nucleotide
  modified_base 78: mod_base = OTHER; note = 2'-O-methyl modified nucleotide
  modified_base 79: mod_base = OTHER; note = 2'-O-methyl modified nucleotide
  modified_base 80: mod_base = OTHER; note = 2'-O-methyl modified nucleotide
  modified_base 81: mod_base = OTHER; note = 2'-O-methyl modified nucleotide
  modified_base 82: mod_base = OTHER; note = 2'-O-methyl modified nucleotide
  modified_base 83: mod_base = OTHER; note = 2'-O-methyl modified nucleotide
  modified_base 84: mod_base = OTHER; note = 2'-O-methyl modified nucleotide
  modified_base 85: mod_base = OTHER; note = 2'-O-methyl modified nucleotide
  modified_base 86: mod_base = OTHER; note = 2'-O-methyl modified nucleotide
  modified_base 87: mod_base = OTHER; note = 2'-O-methyl modified nucleotide
  modified_base 88: mod_base = OTHER; note = 2'-O-methyl modified nucleotide
  modified_base 89: mod_base = OTHER; note = 2'-O-methyl modified nucleotide
  modified_base 90: mod_base = OTHER; note = 2'-O-methyl modified nucleotide
  modified_base 91: mod_base = OTHER; note = 2'-O-methyl modified nucleotide
  modified_base 92: mod_base = OTHER; note = 2'-O-methyl modified nucleotide
  modified_base 93: mod_base = OTHER; note = 2'-O-methyl modified nucleotide
  modified_base 94: mod_base = OTHER; note = 2'-O-methyl modified nucleotide
  modified_base 95: mod_base = OTHER; note = 2'-O-methyl modified nucleotide
  modified_base 96: mod_base = OTHER; note = 2'-O-methyl modified nucleotide
  modified_base 116: mod_base = OTHER; note = Nucleotide with phosphorothioate linkage
  modified_base 117: mod_base = OTHER; note = 2'-O-methyl modified nucleotide with phosphorothioate linkage
  modified_base 118: mod_base = OTHER; note = 2'-O-methyl modified nucleotide with phosphorothioate linkage
  modified_base 119: mod_base = OTHER; note = 2'-O-methyl modified nucleotide
gagaatcaaaatcggtgaatgttttagagctagaaatagcaagttaaaataaggctagtccgttatcaacttgaaaaagtggcaccgagtcggtgcgcctatttaacccaccgattttg

SEQ ID NO: 16388 - RNA, 118 nt, synthetic construct
  source 1..118: mol_type = other RNA
  modified_base 1: mod_base = OTHER; note = 2'-O-methyl modified nucleotide with phosphorothioate linkage
  modified_base 2: mod_base = OTHER; note = 2'-O-methyl modified nucleotide with phosphorothioate linkage
  modified_base 3: mod_base = OTHER; note = 2'-O-methyl modified nucleotide with phosphorothioate linkage
  modified_base 29: mod_base = OTHER; note = 2'-O-methyl modified nucleotide
  modified_base 30: mod_base = OTHER; note = 2'-O-methyl modified nucleotide
  modified_base 31: mod_base = OTHER; note = 2'-O-methyl modified nucleotide
  modified_base 32: mod_base = OTHER; note = 2'-O-methyl modified nucleotide
  modified_base 33: mod_base = OTHER; note = 2'-O-methyl modified nucleotide
  modified_base 34: mod_base = OTHER; note = 2'-O-methyl modified nucleotide
  modified_base 35: mod_base = OTHER; note = 2'-O-methyl modified nucleotide
  modified_base 36: mod_base = OTHER; note = 2'-O-methyl modified nucleotide
  modified_base 37: mod_base = OTHER; note = 2'-O-methyl modified nucleotide
  modified_base 38: mod_base = OTHER; note = 2'-O-methyl modified nucleotide
  modified_base 39: mod_base = OTHER; note = 2'-O-methyl modified nucleotide
  modified_base 40: mod_base = OTHER; note = 2'-O-methyl modified nucleotide
  modified_base 69: mod_base = OTHER; note = 2'-O-methyl modified nucleotide
  modified_base 70: mod_base = OTHER; note = 2'-O-methyl modified nucleotide
  modified_base 71: mod_base = OTHER; note = 2'-O-methyl modified nucleotide
  modified_base 72: mod_base = OTHER; note = 2'-O-methyl modified nucleotide
  modified_base 73: mod_base = OTHER; note = 2'-O-methyl modified nucleotide
  modified_base 74: mod_base = OTHER; note = 2'-O-methyl modified nucleotide
  modified_base 75: mod_base = OTHER; note = 2'-O-methyl modified nucleotide
  modified_base 76: mod_base = OTHER; note = 2'-O-methyl modified nucleotide
  modified_base 77: mod_base = OTHER; note = 2'-O-methyl modified nucleotide
  modified_base 78: mod_base = OTHER; note = 2'-O-methyl modified nucleotide
  modified_base 79: mod_base = OTHER; note = 2'-O-methyl modified nucleotide
  modified_base 80: mod_base = OTHER; note = 2'-O-methyl modified nucleotide
  modified_base 81: mod_base = OTHER; note = 2'-O-methyl modified nucleotide
  modified_base 82: mod_base = OTHER; note = 2'-O-methyl modified nucleotide
  modified_base 83: mod_base = OTHER; note = 2'-O-methyl modified nucleotide
  modified_base 84: mod_base = OTHER; note = 2'-O-methyl modified nucleotide
  modified_base 85: mod_base = OTHER; note = 2'-O-methyl modified nucleotide
  modified_base 86: mod_base = OTHER; note = 2'-O-methyl modified nucleotide
  modified_base 87: mod_base = OTHER; note = 2'-O-methyl modified nucleotide
  modified_base 88: mod_base = OTHER; note = 2'-O-methyl modified nucleotide
  modified_base 89: mod_base = OTHER; note = 2'-O-methyl modified nucleotide
  modified_base 90: mod_base = OTHER; note = 2'-O-methyl modified nucleotide
  modified_base 91: mod_base = OTHER; note = 2'-O-methyl modified nucleotide
  modified_base 92: mod_base = OTHER; note = 2'-O-methyl modified nucleotide
  modified_base 93: mod_base = OTHER; note = 2'-O-methyl modified nucleotide
  modified_base 94: mod_base = OTHER; note = 2'-O-methyl modified nucleotide
  modified_base 95: mod_base = OTHER; note = 2'-O-methyl modified nucleotide
  modified_base 96: mod_base = OTHER; note = 2'-O-methyl modified nucleotide
  modified_base 115: mod_base = OTHER; note = Nucleotide with phosphorothioate linkage
  modified_base 116: mod_base = OTHER; note = 2'-O-methyl modified nucleotide with phosphorothioate linkage
  modified_base 117: mod_base = OTHER; note = 2'-O-methyl modified nucleotide with phosphorothioate linkage
  modified_base 118: mod_base = OTHER; note = 2'-O-methyl modified nucleotide
gagaatcaaaatcggtgaatgttttagagctagaaatagcaagttaaaataaggctagtccgttatcaacttgaaaaagtggcaccgagtcggtgcgcctatttaacccaccgatttt

SEQ ID NO: 16389 - RNA, 117 nt, synthetic construct
  source 1..117: mol_type = other RNA
  modified_base 1: mod_base = OTHER; note = 2'-O-methyl modified nucleotide with phosphorothioate linkage
  modified_base 2: mod_base = OTHER; note = 2'-O-methyl modified nucleotide with phosphorothioate linkage
  modified_base 3: mod_base = OTHER; note = 2'-O-methyl modified nucleotide with phosphorothioate linkage
  modified_base 29: mod_base = OTHER; note = 2'-O-methyl modified nucleotide
  modified_base 30: mod_base = OTHER; note = 2'-O-methyl modified nucleotide
  modified_base 31: mod_base = OTHER; note = 2'-O-methyl modified nucleotide
  modified_base 32: mod_base = OTHER; note = 2'-O-methyl modified nucleotide
  modified_base 33: mod_base = OTHER; note = 2'-O-methyl modified nucleotide
  modified_base 34: mod_base = OTHER; note = 2'-O-methyl modified nucleotide
  modified_base 35: mod_base = OTHER; note = 2'-O-methyl modified nucleotide
  modified_base 36: mod_base = OTHER; note = 2'-O-methyl modified nucleotide
  modified_base 37: mod_base = OTHER; note = 2'-O-methyl modified nucleotide
  modified_base 38: mod_base = OTHER; note = 2'-O-methyl modified nucleotide
  modified_base 39: mod_base = OTHER; note = 2'-O-methyl modified nucleotide
  modified_base 40: mod_base = OTHER; note = 2'-O-methyl modified nucleotide
  modified_base 69: mod_base = OTHER; note = 2'-O-methyl modified nucleotide
  modified_base 70: mod_base = OTHER; note = 2'-O-methyl modified nucleotide
  modified_base 71: mod_base = OTHER; note = 2'-O-methyl modified nucleotide
  modified_base 72: mod_base = OTHER; note = 2'-O-methyl modified nucleotide
  modified_base 73: mod_base = OTHER; note = 2'-O-methyl modified nucleotide
  modified_base 74: mod_base = OTHER; note = 2'-O-methyl modified nucleotide
  modified_base 75: mod_base = OTHER; note = 2'-O-methyl modified nucleotide
  modified_base 76: mod_base = OTHER; note = 2'-O-methyl modified nucleotide
  modified_base 77: mod_base = OTHER; note = 2'-O-methyl modified nucleotide
  modified_base 78: mod_base = OTHER; note = 2'-O-methyl modified nucleotide
  modified_base 79: mod_base = OTHER; note = 2'-O-methyl modified nucleotide
  modified_base 80: mod_base = OTHER; note = 2'-O-methyl modified nucleotide
  modified_base 81: mod_base = OTHER; note = 2'-O-methyl modified nucleotide
  modified_base 82: mod_base = OTHER; note = 2'-O-methyl modified nucleotide
  modified_base 83: mod_base = OTHER; note = 2'-O-methyl modified nucleotide
  modified_base 84: mod_base = OTHER; note = 2'-O-methyl modified nucleotide
  modified_base 85: mod_base = OTHER; note = 2'-O-methyl modified nucleotide
  modified_base 86: mod_base = OTHER; note = 2'-O-methyl modified nucleotide
  modified_base 87: mod_base = OTHER; note = 2'-O-methyl modified nucleotide
  modified_base 88: mod_base = OTHER; note = 2'-O-methyl modified nucleotide
  modified_base 89: mod_base = OTHER; note = 2'-O-methyl modified nucleotide
  modified_base 90: mod_base = OTHER; note = 2'-O-methyl modified nucleotide
  modified_base 91: mod_base = OTHER; note = 2'-O-methyl modified nucleotide
  modified_base 92: mod_base = OTHER; note = 2'-O-methyl modified nucleotide
  modified_base 93: mod_base = OTHER; note = 2'-O-methyl modified nucleotide
  modified_base 94: mod_base = OTHER; note = 2'-O-methyl modified nucleotide
  modified_base 95: mod_base = OTHER; note = 2'-O-methyl modified nucleotide
  modified_base 96: mod_base = OTHER; note = 2'-O-methyl modified nucleotide
  modified_base 114: mod_base = OTHER; note = Nucleotide with phosphorothioate linkage
  modified_base 115: mod_base = OTHER; note = 2'-O-methyl modified nucleotide with phosphorothioate linkage
  modified_base 116: mod_base = OTHER; note = 2'-O-methyl modified nucleotide with phosphorothioate linkage
  modified_base 117: mod_base = OTHER; note = 2'-O-methyl modified nucleotide
gagaatcaaaatcggtgaatgttttagagctagaaatagcaagttaaaataaggctagtccgttatcaacttgaaaaagtggcaccgagtcggtgcgcctatttaacccaccgattt

SEQ ID NO: 16390 - RNA, 116 nt, synthetic construct
  source 1..116: mol_type = other RNA
  modified_base 1: mod_base = OTHER; note = 2'-O-methyl modified nucleotide with phosphorothioate linkage
  modified_base 2: mod_base = OTHER; note = 2'-O-methyl modified nucleotide with phosphorothioate linkage
  modified_base 3: mod_base = OTHER; note = 2'-O-methyl modified nucleotide with phosphorothioate linkage
  modified_base 29: mod_base = OTHER; note = 2'-O-methyl modified nucleotide
  modified_base 30: mod_base = OTHER; note = 2'-O-methyl modified nucleotide
  modified_base 31: mod_base = OTHER; note = 2'-O-methyl modified nucleotide
  modified_base 32: mod_base = OTHER; note = 2'-O-methyl modified nucleotide
  modified_base 33: mod_base = OTHER; note = 2'-O-methyl modified nucleotide
  modified_base 34: mod_base = OTHER; note = 2'-O-methyl modified nucleotide
  modified_base 35: mod_base = OTHER; note = 2'-O-methyl modified nucleotide
  modified_base 36: mod_base = OTHER; note = 2'-O-methyl modified nucleotide
  modified_base 37: mod_base = OTHER; note = 2'-O-methyl modified nucleotide
  modified_base 38: mod_base = OTHER; note = 2'-O-methyl modified nucleotide
  modified_base 39: mod_base = OTHER; note = 2'-O-methyl modified nucleotide
  modified_base 40: mod_base = OTHER; note = 2'-O-methyl modified nucleotide
  modified_base 69: mod_base = OTHER; note = 2'-O-methyl modified nucleotide
  modified_base 70: mod_base = OTHER; note = 2'-O-methyl modified nucleotide
  modified_base 71: mod_base = OTHER; note = 2'-O-methyl modified nucleotide
  modified_base 72: mod_base = OTHER; note = 2'-O-methyl modified nucleotide
  modified_base 73: mod_base = OTHER; note = 2'-O-methyl modified nucleotide
  modified_base 74: mod_base = OTHER; note = 2'-O-methyl modified nucleotide
  modified_base 75: mod_base = OTHER; note = 2'-O-methyl modified nucleotide
  modified_base 76: mod_base = OTHER; note = 2'-O-methyl modified nucleotide
  modified_base 77: mod_base = OTHER; note = 2'-O-methyl modified nucleotide
  modified_base 78: mod_base = OTHER; note = 2'-O-methyl modified nucleotide
  modified_base 79: mod_base = OTHER; note = 2'-O-methyl modified nucleotide
  modified_base 80: mod_base = OTHER; note = 2'-O-methyl modified nucleotide
  modified_base 81: mod_base = OTHER; note = 2'-O-methyl modified nucleotide
  modified_base 82: mod_base = OTHER; note = 2'-O-methyl modified nucleotide
  modified_base 83: mod_base = OTHER; note = 2'-O-methyl modified nucleotide
  modified_base 84: mod_base = OTHER; note = 2'-O-methyl modified nucleotide
  modified_base 85: mod_base = OTHER; note = 2'-O-methyl modified nucleotide
  modified_base 86: mod_base = OTHER; note = 2'-O-methyl modified nucleotide
  modified_base 87: mod_base = OTHER; note = 2'-O-methyl modified nucleotide
  modified_base 88: mod_base = OTHER; note = 2'-O-methyl modified nucleotide
  modified_base 89: mod_base = OTHER; note = 2'-O-methyl modified nucleotide
  modified_base 90: mod_base = OTHER; note = 2'-O-methyl modified nucleotide
  modified_base 91: mod_base = OTHER; note = 2'-O-methyl modified nucleotide
  modified_base 92: mod_base = OTHER; note = 2'-O-methyl modified nucleotide
  modified_base 93: mod_base = OTHER; note = 2'-O-methyl modified nucleotide
  modified_base 94: mod_base = OTHER; note = 2'-O-methyl modified nucleotide
  modified_base 95: mod_base = OTHER; note = 2'-O-methyl modified nucleotide
  modified_base 96: mod_base = OTHER; note = 2'-O-methyl modified nucleotide
  modified_base 113: mod_base = OTHER; note = Nucleotide with phosphorothioate linkage
  modified_base 114: mod_base = OTHER; note = 2'-O-methyl modified nucleotide with phosphorothioate linkage
  modified_base 115: mod_base = OTHER; note = 2'-O-methyl modified nucleotide with phosphorothioate linkage
  modified_base 116: mod_base = OTHER; note = 2'-O-methyl modified nucleotide
gagaatcaaaatcggtgaatgttttagagctagaaatagcaagttaaaataaggctagtccgttatcaacttgaaaaagtggcaccgagtcggtgcgcctatttaacccaccgatt

SEQ ID NO: 16391 - RNA, 123 nt, synthetic construct
  source 1..123: mol_type = other RNA
  modified_base 1: mod_base = OTHER; note = 2'-O-methyl modified nucleotide with phosphorothioate linkage
  modified_base 2: mod_base = OTHER; note = 2'-O-methyl modified nucleotide with phosphorothioate linkage
  modified_base 3: mod_base = OTHER; note = 2'-O-methyl modified nucleotide with phosphorothioate linkage
  modified_base 29: mod_base = OTHER; note = 2'-O-methyl modified nucleotide
  modified_base 30: mod_base = OTHER; note = 2'-O-methyl modified nucleotide
  modified_base 31: mod_base = OTHER; note = 2'-O-methyl modified nucleotide
  modified_base 32: mod_base = OTHER; note = 2'-O-methyl modified nucleotide
  modified_base 33: mod_base = OTHER; note = 2'-O-methyl modified nucleotide
  modified_base 34: mod_base = OTHER; note = 2'-O-methyl modified nucleotide
  modified_base 35: mod_base = OTHER; note = 2'-O-methyl modified nucleotide
  modified_base 36: mod_base = OTHER; note = 2'-O-methyl modified nucleotide
  modified_base 37: mod_base = OTHER; note = 2'-O-methyl modified nucleotide
  modified_base 38: mod_base = OTHER; note = 2'-O-methyl modified nucleotide
  modified_base 39: mod_base = OTHER; note = 2'-O-methyl modified nucleotide
  modified_base 40: mod_base = OTHER; note = 2'-O-methyl modified nucleotide
  modified_base 69: mod_base = OTHER; note = 2'-O-methyl modified nucleotide
  modified_base 70: mod_base = OTHER; note = 2'-O-methyl modified nucleotide
  modified_base 71: mod_base = OTHER; note = 2'-O-methyl modified nucleotide
  modified_base 72: mod_base = OTHER; note = 2'-O-methyl modified nucleotide
  modified_base 73: mod_base = OTHER; note = 2'-O-methyl modified nucleotide
  modified_base 74: mod_base = OTHER; note = 2'-O-methyl modified nucleotide
  modified_base 75: mod_base = OTHER; note = 2'-O-methyl modified nucleotide
  modified_base 76: mod_base = OTHER; note = 2'-O-methyl modified nucleotide
  modified_base 77: mod_base = OTHER; note = 2'-O-methyl modified nucleotide
  modified_base 78: mod_base = OTHER; note = 2'-O-methyl modified nucleotide
  modified_base 79: mod_base = OTHER; note = 2'-O-methyl modified nucleotide
  modified_base 80: mod_base = OTHER; note = 2'-O-methyl modified nucleotide
  modified_base 81: mod_base = OTHER; note = 2'-O-methyl modified nucleotide
  modified_base 82: mod_base = OTHER; note = 2'-O-methyl modified nucleotide
  modified_base 83: mod_base = OTHER; note = 2'-O-methyl modified nucleotide
  modified_base 84: mod_base = OTHER; note = 2'-O-methyl modified nucleotide
  modified_base 85: mod_base = OTHER; note = 2'-O-methyl modified nucleotide
  modified_base 86: mod_base = OTHER; note = 2'-O-methyl modified nucleotide
  modified_base 87: mod_base = OTHER; note = 2'-O-methyl modified nucleotide
  modified_base 88: mod_base = OTHER; note = 2'-O-methyl modified nucleotide
  modified_base 89: mod_base = OTHER; note = 2'-O-methyl modified nucleotide
  modified_base 90: mod_base = OTHER; note = 2'-O-methyl modified nucleotide
  modified_base 91: mod_base = OTHER; note = 2'-O-methyl modified nucleotide
  modified_base 92: mod_base = OTHER; note = 2'-O-methyl modified nucleotide
  modified_base 93: mod_base = OTHER; note = 2'-O-methyl modified nucleotide
  modified_base 94: mod_base = OTHER; note = 2'-O-methyl modified nucleotide
  modified_base 95: mod_base = OTHER; note = 2'-O-methyl modified nucleotide
  modified_base 96: mod_base = OTHER; note = 2'-O-methyl modified nucleotide
  modified_base 120: mod_base = OTHER; note = Nucleotide with phosphorothioate linkage
  modified_base 121: mod_base = OTHER; note = 2'-O-methyl modified nucleotide with phosphorothioate linkage
  modified_base 122: mod_base = OTHER; note = 2'-O-methyl modified nucleotide with phosphorothioate linkage
  modified_base 123: mod_base = OTHER; note = 2'-O-methyl modified nucleotide
gagaatcaaaatcggtgaatgttttagagctagaaatagcaagttaaaataaggctagtccgttatcaacttgaaaaagtggcaccgagtcggtgcctgcctatttaacccaccgattttgat

SEQ ID NO: 16392 - RNA, 122 nt, synthetic construct
  source 1..122: mol_type = other RNA
  modified_base 1: mod_base = OTHER; note = 2'-O-methyl modified nucleotide with phosphorothioate linkage
  modified_base 2: mod_base = OTHER; note = 2'-O-methyl modified nucleotide with phosphorothioate linkage
  modified_base 3: mod_base = OTHER; note = 2'-O-methyl modified nucleotide with phosphorothioate linkage
  modified_base 29: mod_base = OTHER; note = 2'-O-methyl modified nucleotide
  modified_base 30: mod_base = OTHER; note = 2'-O-methyl modified nucleotide
  modified_base 31: mod_base = OTHER; note = 2'-O-methyl modified nucleotide
  modified_base 32: mod_base = OTHER; note = 2'-O-methyl modified nucleotide
  modified_base 33: mod_base = OTHER; note = 2'-O-methyl modified nucleotide
  modified_base 34: mod_base = OTHER; note = 2'-O-methyl modified nucleotide
  modified_base 35: mod_base = OTHER; note = 2'-O-methyl modified nucleotide
  modified_base 36: mod_base = OTHER; note = 2'-O-methyl modified nucleotide
  modified_base 37: mod_base = OTHER; note = 2'-O-methyl modified nucleotide
  modified_base 38: mod_base = OTHER; note = 2'-O-methyl modified nucleotide
  modified_base 39: mod_base = OTHER; note = 2'-O-methyl modified nucleotide
  modified_base 40: mod_base = OTHER; note = 2'-O-methyl modified nucleotide
  modified_base 69: mod_base = OTHER; note = 2'-O-methyl modified nucleotide
  modified_base 70: mod_base = OTHER; note = 2'-O-methyl modified nucleotide
  modified_base 71: mod_base = OTHER; note = 2'-O-methyl modified nucleotide
  modified_base 72: mod_base = OTHER; note = 2'-O-methyl modified nucleotide
  modified_base 73: mod_base = OTHER; note = 2'-O-methyl modified nucleotide
  modified_base 74: mod_base = OTHER; note = 2'-O-methyl modified nucleotide
  modified_base 75: mod_base = OTHER; note = 2'-O-methyl modified nucleotide
  modified_base 76: mod_base = OTHER; note = 2'-O-methyl modified nucleotide
  modified_base 77: mod_base = OTHER; note = 2'-O-methyl modified nucleotide
  modified_base 78: mod_base = OTHER; note = 2'-O-methyl modified nucleotide
  modified_base 79: mod_base = OTHER; note = 2'-O-methyl modified nucleotide
  modified_base 80: mod_base = OTHER; note = 2'-O-methyl modified nucleotide
  modified_base 81: mod_base = OTHER; note = 2'-O-methyl modified nucleotide
  modified_base 82: mod_base = OTHER; note = 2'-O-methyl modified nucleotide
  modified_base 83: mod_base = OTHER; note = 2'-O-methyl modified nucleotide
  modified_base 84: mod_base = OTHER; note = 2'-O-methyl modified nucleotide
  modified_base 85: mod_base = OTHER; note = 2'-O-methyl modified nucleotide
  modified_base 86: mod_base = OTHER; note = 2'-O-methyl modified nucleotide
  modified_base 87: mod_base = OTHER; note = 2'-O-methyl modified nucleotide
  modified_base 88: mod_base = OTHER; note = 2'-O-methyl modified nucleotide
  modified_base 89: mod_base = OTHER; note = 2'-O-methyl modified nucleotide
  modified_base 90: mod_base = OTHER; note = 2'-O-methyl modified nucleotide
  modified_base 91: mod_base = OTHER; note = 2'-O-methyl modified nucleotide
  modified_base 92: mod_base = OTHER; note = 2'-O-methyl modified nucleotide
  modified_base 93: mod_base = OTHER; note = 2'-O-methyl modified nucleotide
  modified_base 94: mod_base = OTHER; note = 2'-O-methyl modified nucleotide
  modified_base 95: mod_base = OTHER; note = 2'-O-methyl modified nucleotide
  modified_base 96: mod_base = OTHER; note = 2'-O-methyl modified nucleotide
  modified_base 119: mod_base = OTHER; note = Nucleotide with phosphorothioate linkage
  modified_base 120: mod_base = OTHER; note = 2'-O-methyl modified nucleotide with phosphorothioate linkage
  modified_base 121: mod_base = OTHER; note = 2'-O-methyl modified nucleotide with phosphorothioate linkage
  modified_base 122: mod_base = OTHER; note = 2'-O-methyl modified nucleotide
gagaatcaaaatcggtgaatgttttagagctagaaatagcaagttaaaataaggctagtccgttatcaacttgaaaaagtggcaccgagtcggtgcctgcctatttaacccaccgattttga

SEQ ID NO: 16393 - RNA, 121 nt, synthetic construct
  source 1..121: mol_type = other RNA
  modified_base 1: mod_base = OTHER; note = 2'-O-methyl modified nucleotide with phosphorothioate linkage
  modified_base 2: mod_base = OTHER; note = 2'-O-methyl modified nucleotide with phosphorothioate linkage
  modified_base 3: mod_base = OTHER; note = 2'-O-methyl modified nucleotide with phosphorothioate linkage
  modified_base 29: mod_base = OTHER; note = 2'-O-methyl modified nucleotide
  modified_base 30: mod_base = OTHER; note = 2'-O-methyl modified nucleotide
  modified_base 31: mod_base = OTHER; note = 2'-O-methyl modified nucleotide
  modified_base 32: mod_base = OTHER; note = 2'-O-methyl modified nucleotide
  modified_base 33: mod_base = OTHER; note = 2'-O-methyl modified nucleotide
  modified_base 34: mod_base = OTHER; note = 2'-O-methyl modified nucleotide
  modified_base 35: mod_base = OTHER; note = 2'-O-methyl modified nucleotide
  modified_base 36: mod_base = OTHER; note = 2'-O-methyl modified nucleotide
  modified_base 37: mod_base = OTHER; note = 2'-O-methyl modified nucleotide
  modified_base 38: mod_base = OTHER; note = 2'-O-methyl modified nucleotide
  modified_base 39: mod_base = OTHER; note = 2'-O-methyl modified nucleotide
  modified_base 40: mod_base = OTHER; note = 2'-O-methyl modified nucleotide
  modified_base 69: mod_base = OTHER; note = 2'-O-methyl modified nucleotide
  modified_base 70: mod_base = OTHER; note = 2'-O-methyl modified nucleotide
  modified_base 71: mod_base = OTHER; note = 2'-O-methyl modified nucleotide
  modified_base 72: mod_base = OTHER; note = 2'-O-methyl modified nucleotide
  modified_base 73: mod_base = OTHER; note = 2'-O-methyl modified nucleotide
  modified_base 74: mod_base = OTHER; note = 2'-O-methyl modified nucleotide
  modified_base 75: mod_base = OTHER; note = 2'-O-methyl modified nucleotide
  modified_base 76: mod_base = OTHER; note = 2'-O-methyl modified nucleotide
  modified_base 77: mod_base = OTHER; note = 2'-O-methyl modified nucleotide
  modified_base 78: mod_base = OTHER; note = 2'-O-methyl modified nucleotide
  modified_base 79: mod_base = OTHER; note = 2'-O-methyl modified nucleotide
  modified_base 80: mod_base = OTHER; note = 2'-O-methyl modified nucleotide
  modified_base 81: mod_base = OTHER; note = 2'-O-methyl modified nucleotide
  modified_base 82: mod_base = OTHER; note = 2'-O-methyl modified nucleotide
  modified_base 83: mod_base = OTHER; note = 2'-O-methyl modified nucleotide
  modified_base 84: mod_base = OTHER; note = 2'-O-methyl modified nucleotide
  modified_base 85: mod_base = OTHER; note = 2'-O-methyl modified nucleotide
  modified_base 86: mod_base = OTHER; note = 2'-O-methyl modified nucleotide
  modified_base 87: mod_base = OTHER; note = 2'-O-methyl modified nucleotide
  modified_base 88: mod_base = OTHER; note = 2'-O-methyl modified nucleotide
  modified_base 89: mod_base = OTHER; note = 2'-O-methyl modified nucleotide
  modified_base 90: mod_base = OTHER; note = 2'-O-methyl modified nucleotide
  modified_base 91: mod_base = OTHER; note = 2'-O-methyl modified nucleotide
  modified_base 92: mod_base = OTHER; note = 2'-O-methyl modified nucleotide
  modified_base 93: mod_base = OTHER; note = 2'-O-methyl modified nucleotide
  modified_base 94: mod_base = OTHER; note = 2'-O-methyl modified nucleotide
  modified_base 95: mod_base = OTHER; note = 2'-O-methyl modified nucleotide
  modified_base 96: mod_base = OTHER; note = 2'-O-methyl modified nucleotide
  modified_base 118: mod_base = OTHER; note = Nucleotide with phosphorothioate linkage
  modified_base 119: mod_base = OTHER; note = 2'-O-methyl modified nucleotide with phosphorothioate linkage
  modified_base 120: mod_base = OTHER; note = 2'-O-methyl modified nucleotide with phosphorothioate linkage
  modified_base 121: mod_base = OTHER; note = 2'-O-methyl modified nucleotide
gagaatcaaaatcggtgaatgttttagagctagaaatagcaagttaaaataaggctagtccgttatcaacttgaaaaagtggcaccgagtcggtgcctgcctatttaacccaccgattttg

SEQ ID NO: 16394 - RNA, 120 nt, synthetic construct
  source 1..120: mol_type = other RNA
  modified_base 1: mod_base = OTHER; note = 2'-O-methyl modified nucleotide with phosphorothioate linkage
  modified_base 2: mod_base = OTHER; note = 2'-O-methyl modified nucleotide with phosphorothioate linkage
  modified_base 3: mod_base = OTHER; note = 2'-O-methyl modified nucleotide with phosphorothioate linkage
  modified_base 29: mod_base = OTHER; note = 2'-O-methyl modified nucleotide
  modified_base 30: mod_base = OTHER; note = 2'-O-methyl modified nucleotide
  modified_base 31: mod_base = OTHER; note = 2'-O-methyl modified nucleotide
  modified_base 32: mod_base = OTHER; note = 2'-O-methyl modified nucleotide
  modified_base 33: mod_base = OTHER; note = 2'-O-methyl modified nucleotide
  modified_base 34: mod_base = OTHER; note = 2'-O-methyl modified nucleotide
  modified_base 35: mod_base = OTHER; note = 2'-O-methyl modified nucleotide
  modified_base 36: mod_base = OTHER; note = 2'-O-methyl modified nucleotide
  modified_base 37: mod_base = OTHER; note = 2'-O-methyl modified nucleotide
  modified_base 38: mod_base = OTHER; note = 2'-O-methyl modified nucleotide
  modified_base 39: mod_base = OTHER; note = 2'-O-methyl modified nucleotide
  modified_base 40: mod_base = OTHER; note = 2'-O-methyl modified nucleotide
  modified_base 69: mod_base = OTHER; note = 2'-O-methyl modified nucleotide
  modified_base 70: mod_base = OTHER; note = 2'-O-methyl modified nucleotide
  modified_base 71: mod_base = OTHER; note = 2'-O-methyl modified nucleotide
  modified_base 72: mod_base = OTHER; note = 2'-O-methyl modified nucleotide
  modified_base 73: mod_base = OTHER; note = 2'-O-methyl modified nucleotide
  modified_base 74: mod_base = OTHER; note = 2'-O-methyl modified nucleotide
  modified_base 75: mod_base = OTHER; note = 2'-O-methyl modified nucleotide
  modified_base 76: mod_base = OTHER; note = 2'-O-methyl modified nucleotide
  modified_base 77: mod_base = OTHER; note = 2'-O-methyl modified nucleotide
  modified_base 78: mod_base = OTHER; note = 2'-O-methyl modified nucleotide
  modified_base 79: mod_base = OTHER; note = 2'-O-methyl modified nucleotide
  modified_base 80: mod_base = OTHER; note = 2'-O-methyl modified nucleotide
  modified_base 81: mod_base = OTHER; note = 2'-O-methyl modified nucleotide
  modified_base 82: mod_base = OTHER; note = 2'-O-methyl modified nucleotide
  modified_base 83: mod_base = OTHER; note = 2'-O-methyl modified nucleotide
  modified_base 84: mod_base = OTHER; note = 2'-O-methyl modified nucleotide
  modified_base 85: mod_base = OTHER; note = 2'-O-methyl modified nucleotide
  modified_base 86: mod_base = OTHER; note = 2'-O-methyl modified nucleotide
  modified_base 87: mod_base = OTHER; note = 2'-O-methyl modified nucleotide
  modified_base 88: mod_base = OTHER; note = 2'-O-methyl modified nucleotide
  modified_base 89: mod_base = OTHER; note = 2'-O-methyl modified nucleotide
  modified_base 90: mod_base = OTHER; note = 2'-O-methyl modified nucleotide
  modified_base 91: mod_base = OTHER; note = 2'-O-methyl modified nucleotide
  modified_base 92: mod_base = OTHER; note = 2'-O-methyl modified nucleotide
  modified_base 93: mod_base = OTHER; note = 2'-O-methyl modified nucleotide
  modified_base 94: mod_base = OTHER; note = 2'-O-methyl modified nucleotide
  modified_base 95: mod_base = OTHER; note = 2'-O-methyl modified nucleotide
  modified_base 96: mod_base = OTHER; note = 2'-O-methyl modified nucleotide
  modified_base 117: mod_base = OTHER; note = Nucleotide with phosphorothioate linkage
  modified_base 118: mod_base = OTHER; note = 2'-O-methyl modified nucleotide with phosphorothioate linkage
  modified_base 119: mod_base = OTHER; note = 2'-O-methyl modified nucleotide with phosphorothioate linkage
  modified_base 120: mod_base = OTHER; note = 2'-O-methyl modified nucleotide
gagaatcaaaatcggtgaatgttttagagctagaaatagcaagttaaaataaggctagtccgttatcaacttgaaaaagtggcaccgagtcggtgcctgcctatttaacccaccgatttt

SEQ ID NO: 16395 - RNA, 119 nt, synthetic construct
  source 1..119: mol_type = other RNA
  modified_base 1: mod_base = OTHER; note = 2'-O-methyl modified nucleotide with phosphorothioate linkage
  modified_base 2: mod_base = OTHER; note = 2'-O-methyl modified nucleotide with phosphorothioate linkage
  modified_base 3: mod_base = OTHER; note = 2'-O-methyl modified nucleotide with phosphorothioate linkage
  modified_base 29: mod_base = OTHER; note = 2'-O-methyl modified nucleotide
  modified_base 30: mod_base = OTHER; note = 2'-O-methyl modified nucleotide
  modified_base 31: mod_base = OTHER; note = 2'-O-methyl modified nucleotide
  modified_base 32: mod_base = OTHER; note = 2'-O-methyl modified nucleotide
  modified_base 33: mod_base = OTHER; note = 2'-O-methyl modified nucleotide
  modified_base 34: mod_base = OTHER; note = 2'-O-methyl modified nucleotide
  modified_base 35: mod_base = OTHER; note = 2'-O-methyl modified nucleotide
  modified_base 36: mod_base = OTHER; note = 2'-O-methyl modified nucleotide
  modified_base 37: mod_base = OTHER; note = 2'-O-methyl modified nucleotide
  modified_base 38: mod_base = OTHER; note = 2'-O-methyl modified nucleotide
  modified_base 39: mod_base = OTHER; note = 2'-O-methyl modified nucleotide
  modified_base 40: mod_base = OTHER; note = 2'-O-methyl modified nucleotide
  modified_base 69: mod_base = OTHER; note = 2'-O-methyl modified nucleotide
  modified_base 70: mod_base = OTHER; note = 2'-O-methyl modified nucleotide
  modified_base 71: mod_base = OTHER; note = 2'-O-methyl modified nucleotide
  modified_base 72: mod_base = OTHER; note = 2'-O-methyl modified nucleotide
  modified_base 73: mod_base = OTHER; note = 2'-O-methyl modified nucleotide
  modified_base 74: mod_base = OTHER; note = 2'-O-methyl modified nucleotide
  modified_base 75: mod_base = OTHER; note = 2'-O-methyl modified nucleotide
  modified_base 76: mod_base = OTHER; note = 2'-O-methyl modified nucleotide
  modified_base 77: mod_base = OTHER; note = 2'-O-methyl modified nucleotide
  modified_base 78: mod_base = OTHER; note = 2'-O-methyl modified nucleotide
  modified_base 79: mod_base = OTHER; note = 2'-O-methyl modified nucleotide
  modified_base 80: mod_base = OTHER; note = 2'-O-methyl modified nucleotide
  modified_base 81: mod_base = OTHER; note = 2'-O-methyl modified nucleotide
  modified_base 82: mod_base = OTHER; note = 2'-O-methyl modified nucleotide
  modified_base 83: mod_base = OTHER; note = 2'-O-methyl modified nucleotide
  modified_base 84: mod_base = OTHER; note = 2'-O-methyl modified nucleotide
  modified_base 85: mod_base = OTHER; note = 2'-O-methyl modified nucleotide
  modified_base 86: mod_base = OTHER; note = 2'-O-methyl modified nucleotide
  modified_base 87: mod_base = OTHER; note = 2'-O-methyl modified nucleotide
  modified_base 88: mod_base = OTHER; note = 2'-O-methyl modified nucleotide
  modified_base 89: mod_base = OTHER; note = 2'-O-methyl modified nucleotide
  modified_base 90: mod_base = OTHER; note = 2'-O-methyl modified nucleotide
  modified_base 91: mod_base = OTHER; note = 2'-O-methyl modified nucleotide
  modified_base 92: mod_base = OTHER; note = 2'-O-methyl modified nucleotide
  modified_base 93: mod_base = OTHER; note = 2'-O-methyl modified nucleotide
  modified_base 94: mod_base = OTHER; note = 2'-O-methyl modified nucleotide
  modified_base 95: mod_base = OTHER; note = 2'-O-methyl modified nucleotide
  modified_base 96: mod_base = OTHER; note = 2'-O-methyl modified nucleotide
  modified_base 116: mod_base = OTHER; note = Nucleotide with phosphorothioate linkage
  modified_base 117: mod_base = OTHER; note = 2'-O-methyl modified nucleotide with phosphorothioate linkage
  modified_base 118: mod_base = OTHER; note = 2'-O-methyl modified nucleotide with phosphorothioate linkage
  modified_base 119: mod_base = OTHER; note = 2'-O-methyl modified nucleotide
gagaatcaaaatcggtgaatgttttagagctagaaatagcaagttaaaataaggctagtccgttatcaacttgaaaaagtggcaccgagtcggtgcctgcctatttaacccaccgattt

SEQ ID NO: 16396 - RNA, 118 nt, synthetic construct
  source 1..118: mol_type = other RNA
  modified_base 1: mod_base = OTHER; note = 2'-O-methyl modified nucleotide with phosphorothioate linkage
  modified_base 2: mod_base = OTHER; note = 2'-O-methyl modified nucleotide with phosphorothioate linkage
  modified_base 3: mod_base = OTHER; note = 2'-O-methyl modified nucleotide with phosphorothioate linkage
  modified_base 29: mod_base = OTHER; note = 2'-O-methyl modified nucleotide
  modified_base 30: mod_base = OTHER; note = 2'-O-methyl modified nucleotide
  modified_base 31: mod_base = OTHER; note = 2'-O-methyl modified nucleotide
  modified_base 32: mod_base = OTHER; note = 2'-O-methyl modified nucleotide
  modified_base 33: mod_base = OTHER; note = 2'-O-methyl modified nucleotide
  modified_base 34: mod_base = OTHER; note = 2'-O-methyl modified nucleotide
  modified_base 35: mod_base = OTHER; note = 2'-O-methyl modified nucleotide
  modified_base 36: mod_base = OTHER; note = 2'-O-methyl modified nucleotide
  modified_base 37: mod_base = OTHER; note = 2'-O-methyl modified nucleotide
  modified_base 38: mod_base = OTHER; note = 2'-O-methyl modified nucleotide
  modified_base 39: mod_base = OTHER; note = 2'-O-methyl modified nucleotide
  modified_base 40: mod_base = OTHER; note = 2'-O-methyl modified nucleotide
  modified_base 69: mod_base = OTHER; note = 2'-O-methyl modified nucleotide
  modified_base 70: mod_base = OTHER; note = 2'-O-methyl modified nucleotide
  modified_base 71: mod_base = OTHER; note = 2'-O-methyl modified nucleotide
  modified_base 72: mod_base = OTHER; note = 2'-O-methyl modified nucleotide
  modified_base 73: mod_base = OTHER; note = 2'-O-methyl modified nucleotide
  modified_base 74: mod_base = OTHER; note = 2'-O-methyl modified nucleotide
  modified_base 75: mod_base = OTHER; note = 2'-O-methyl modified nucleotide
  modified_base 76: mod_base = OTHER; note = 2'-O-methyl modified nucleotide
  modified_base 77: mod_base = OTHER; note = 2'-O-methyl modified nucleotide
  modified_base 78: mod_base = OTHER; note = 2'-O-methyl modified nucleotide
  modified_base 79: mod_base = OTHER; note = 2'-O-methyl modified nucleotide
  modified_base 80: mod_base = OTHER; note = 2'-O-methyl modified nucleotide
  modified_base 81: mod_base = OTHER; note = 2'-O-methyl modified nucleotide
  modified_base 82: mod_base = OTHER; note = 2'-O-methyl modified nucleotide
  modified_base 83: mod_base = OTHER; note = 2'-O-methyl modified nucleotide
  modified_base 84: mod_base = OTHER; note = 2'-O-methyl modified nucleotide
  modified_base 85: mod_base = OTHER; note = 2'-O-methyl modified nucleotide
  modified_base 86: mod_base = OTHER; note = 2'-O-methyl modified nucleotide
  modified_base 87: mod_base = OTHER; note = 2'-O-methyl modified nucleotide
  modified_base 88: mod_base = OTHER; note = 2'-O-methyl modified nucleotide
  modified_base 89: mod_base = OTHER; note = 2'-O-methyl modified nucleotide
  modified_base 90: mod_base = OTHER; note = 2'-O-methyl modified nucleotide
  modified_base 91: mod_base = OTHER; note = 2'-O-methyl modified nucleotide
  modified_base 92: mod_base = OTHER; note = 2'-O-methyl modified nucleotide
  modified_base 93: mod_base = OTHER; note = 2'-O-methyl modified nucleotide
  modified_base 94: mod_base = OTHER; note = 2'-O-methyl modified nucleotide
  modified_base 95: mod_base = OTHER; note = 2'-O-methyl modified nucleotide
  modified_base 96: mod_base = OTHER; note = 2'-O-methyl modified nucleotide
  modified_base 115: mod_base = OTHER; note = Nucleotide with phosphorothioate linkage
  modified_base 116: mod_base = OTHER; note = 2'-O-methyl modified nucleotide with phosphorothioate linkage
  modified_base 117: mod_base = OTHER; note = 2'-O-methyl modified nucleotide with phosphorothioate linkage
  modified_base 118: mod_base = OTHER; note = 2'-O-methyl modified nucleotide
gagaatcaaaatcggtgaatgttttagagctagaaatagcaagttaaaataaggctagtccgttatcaacttgaaaaagtggcaccgagtcggtgcctgcctatttaacccaccgatt

SEQ ID NO: 16397 - RNA, 125 nt, synthetic construct
  source 1..125: mol_type = other RNA
  modified_base 1: mod_base = OTHER; note = 2'-O-methyl modified nucleotide with phosphorothioate linkage
  modified_base 2: mod_base = OTHER; note = 2'-O-methyl modified nucleotide with phosphorothioate linkage
  modified_base 3: mod_base = OTHER; note = 2'-O-methyl modified nucleotide with phosphorothioate linkage
  modified_base 29: mod_base = OTHER; note = 2'-O-methyl modified nucleotide
  modified_base 30: mod_base = OTHER; note = 2'-O-methyl modified nucleotide
  modified_base 31: mod_base = OTHER; note = 2'-O-methyl modified nucleotide
  modified_base 32: mod_base = OTHER; note = 2'-O-methyl modified nucleotide
  modified_base 33: mod_base = OTHER; note = 2'-O-methyl modified nucleotide
  modified_base 34: mod_base = OTHER; note = 2'-O-methyl modified nucleotide
  modified_base 35: mod_base = OTHER; note = 2'-O-methyl modified nucleotide
  modified_base 36: mod_base = OTHER; note = 2'-O-methyl modified nucleotide
  modified_base 37: mod_base = OTHER; note = 2'-O-methyl modified nucleotide
  modified_base 38: mod_base = OTHER; note = 2'-O-methyl modified nucleotide
  modified_base 39: mod_base = OTHER; note = 2'-O-methyl modified nucleotide
  modified_base 40: mod_base = OTHER; note = 2'-O-methyl modified nucleotide
  modified_base 69: mod_base = OTHER; note = 2'-O-methyl modified nucleotide
  modified_base 70: mod_base = OTHER; note = 2'-O-methyl modified nucleotide
  modified_base 71: mod_base = OTHER; note = 2'-O-methyl modified nucleotide
  modified_base 72: mod_base = OTHER; note = 2'-O-methyl modified nucleotide
  modified_base 73: mod_base = OTHER; note = 2'-O-methyl modified nucleotide
  modified_base 74: mod_base = OTHER; note = 2'-O-methyl modified nucleotide
  modified_base 75: mod_base = OTHER; note = 2'-O-methyl modified nucleotide
  modified_base 76: mod_base = OTHER; note = 2'-O-methyl modified nucleotide
  modified_base 77: mod_base = OTHER; note = 2'-O-methyl modified nucleotide
  modified_base 78: mod_base = OTHER; note = 2'-O-methyl modified nucleotide
  modified_base 79: mod_base = OTHER; note = 2'-O-methyl modified nucleotide
  modified_base 80: mod_base = OTHER; note = 2'-O-methyl modified nucleotide
  modified_base 81: mod_base = OTHER; note = 2'-O-methyl modified nucleotide
  modified_base 82: mod_base = OTHER; note = 2'-O-methyl modified nucleotide
  modified_base 83: mod_base = OTHER; note = 2'-O-methyl modified nucleotide
  modified_base 84: mod_base = OTHER; note = 2'-O-methyl modified nucleotide
  modified_base 85: mod_base = OTHER; note = 2'-O-methyl modified nucleotide
  modified_base 86: mod_base = OTHER; note = 2'-O-methyl modified nucleotide
  modified_base 87: mod_base = OTHER; note = 2'-O-methyl modified nucleotide
  modified_base 88: mod_base = OTHER; note = 2'-O-methyl modified nucleotide
  modified_base 89: mod_base = OTHER; note = 2'-O-methyl modified nucleotide
  modified_base 90: mod_base = OTHER; note = 2'-O-methyl modified nucleotide
  modified_base 91: mod_base = OTHER; note = 2'-O-methyl modified nucleotide
  modified_base 92: mod_base = OTHER; note = 2'-O-methyl modified nucleotide
  modified_base 93: mod_base = OTHER; note = 2'-O-methyl modified nucleotide
  modified_base 94: mod_base = OTHER; note = 2'-O-methyl modified nucleotide
  modified_base 95: mod_base = OTHER; note = 2'-O-methyl modified nucleotide
  modified_base 96: mod_base = OTHER; note = 2'-O-methyl modified nucleotide
  modified_base 122: mod_base = OTHER; note = Nucleotide with phosphorothioate linkage
  modified_base 123: mod_base = OTHER; note = 2'-O-methyl modified nucleotide with phosphorothioate linkage
  modified_base 124: mod_base = OTHER; note = 2'-O-methyl modified nucleotide with phosphorothioate linkage
  modified_base 125: mod_base = OTHER; note = 2'-O-methyl modified nucleotide
gagaatcaaaatcggtgaatgttttagagctagaaatagcaagttaaaataaggctagtccgttatcaacttgaaaaagtggcaccgagtcggtgcgtctgcctatttaacccaccgattttgat

SEQ ID NO: 16398 - RNA, 124 nt, synthetic construct
  source 1..124: mol_type = other RNA
  modified_base 1: mod_base = OTHER; note = 2'-O-methyl modified nucleotide with phosphorothioate linkage
  modified_base 2: mod_base = OTHER; note = 2'-O-methyl modified nucleotide with phosphorothioate linkage
  modified_base 3: mod_base = OTHER; note = 2'-O-methyl modified nucleotide with phosphorothioate linkage
  modified_base 29: mod_base = OTHER; note = 2'-O-methyl modified nucleotide
  modified_base 30: mod_base = OTHER; note = 2'-O-methyl modified nucleotide
  modified_base 31: mod_base = OTHER; note = 2'-O-methyl modified nucleotide
  modified_base 32: mod_base = OTHER; note = 2'-O-methyl modified nucleotide
  modified_base 33: mod_base = OTHER; note = 2'-O-methyl modified nucleotide
  modified_base 34: mod_base = OTHER; note = 2'-O-methyl modified nucleotide
  modified_base 35: mod_base = OTHER; note = 2'-O-methyl modified nucleotide
  modified_base 36: mod_base = OTHER; note = 2'-O-methyl modified nucleotide
  modified_base 37: mod_base = OTHER; note = 2'-O-methyl modified nucleotide
  modified_base 38: mod_base = OTHER; note = 2'-O-methyl modified nucleotide
  modified_base 39: mod_base = OTHER; note = 2'-O-methyl modified nucleotide
  modified_base 40: mod_base = OTHER; note = 2'-O-methyl modified nucleotide
  modified_base 69: mod_base = OTHER; note = 2'-O-methyl modified nucleotide
  modified_base 70: mod_base = OTHER; note = 2'-O-methyl modified nucleotide
  modified_base 71: mod_base = OTHER; note = 2'-O-methyl modified nucleotide
  modified_base 72: mod_base = OTHER; note = 2'-O-methyl modified nucleotide
  modified_base 73: mod_base = OTHER; note = 2'-O-methyl modified nucleotide
  modified_base 74: mod_base = OTHER; note = 2'-O-methyl modified nucleotide
  modified_base 75: mod_base = OTHER; note = 2'-O-methyl modified nucleotide
  modified_base 76: mod_base = OTHER; note = 2'-O-methyl modified nucleotide
  modified_base 77: mod_base = OTHER; note = 2'-O-methyl modified nucleotide
  modified_base 78: mod_base = OTHER; note = 2'-O-methyl modified nucleotide
  modified_base 79: mod_base = OTHER; note = 2'-O-methyl modified nucleotide
  modified_base 80: mod_base = OTHER; note = 2'-O-methyl modified nucleotide
  modified_base 81: mod_base = OTHER; note = 2'-O-methyl modified nucleotide
  modified_base 82: mod_base = OTHER; note = 2'-O-methyl modified nucleotide
  modified_base 83: mod_base = OTHER; note = 2'-O-methyl modified nucleotide
  modified_base 84: mod_base = OTHER; note = 2'-O-methyl modified nucleotide
  modified_base 85: mod_base = OTHER; note = 2'-O-methyl modified nucleotide
  modified_base 86: mod_base = OTHER; note = 2'-O-methyl modified nucleotide
  modified_base 87: mod_base = OTHER; note = 2'-O-methyl modified nucleotide
  modified_base 88: mod_base = OTHER; note = 2'-O-methyl modified nucleotide
  modified_base 89: mod_base = OTHER; note = 2'-O-methyl modified nucleotide
  modified_base 90: mod_base = OTHER; note = 2'-O-methyl modified nucleotide
  modified_base 91: mod_base = OTHER; note = 2'-O-methyl modified nucleotide
  modified_base 92: mod_base = OTHER; note = 2'-O-methyl modified nucleotide
  modified_base 93: mod_base = OTHER; note = 2'-O-methyl modified nucleotide
  modified_base 94: mod_base = OTHER; note = 2'-O-methyl modified nucleotide
  modified_base 95: mod_base = OTHER; note = 2'-O-methyl modified nucleotide
  modified_base 96: mod_base = OTHER; note = 2'-O-methyl modified nucleotide
  modified_base 121: mod_base = OTHER; note = Nucleotide with phosphorothioate linkage
  modified_base 122: mod_base = OTHER; note = 2'-O-methyl modified nucleotide with phosphorothioate linkage
  modified_base 123: mod_base = OTHER; note = 2'-O-methyl modified nucleotide with phosphorothioate linkage
  modified_base 124: mod_base = OTHER; note = 2'-O-methyl modified nucleotide
gagaatcaaaatcggtgaatgttttagagctagaaatagcaagttaaaataaggctagtccgttatcaacttgaaaaagtggcaccgagtcggtgcgtctgcctatttaacccaccgattttga

SEQ ID NO: 16399 - RNA, 123 nt, synthetic construct
  source 1..123: mol_type = other RNA
  modified_base 1: mod_base = OTHER; note = 2'-O-methyl modified nucleotide with phosphorothioate linkage
  modified_base 2: mod_base = OTHER; note = 2'-O-methyl modified nucleotide with phosphorothioate linkage
  modified_base 3: mod_base = OTHER; note = 2'-O-methyl modified nucleotide with phosphorothioate linkage
  modified_base 29: mod_base = OTHER; note = 2'-O-methyl modified nucleotide
  modified_base 30: mod_base = OTHER; note = 2'-O-methyl modified nucleotide
  modified_base 31: mod_base = OTHER; note = 2'-O-methyl modified nucleotide
  modified_base 32: mod_base = OTHER; note = 2'-O-methyl modified nucleotide
  modified_base 33: mod_base = OTHER; note = 2'-O-methyl modified nucleotide
  modified_base 34: mod_base = OTHER; note = 2'-O-methyl modified nucleotide
  modified_base 35: mod_base = OTHER; note = 2'-O-methyl modified nucleotide
  modified_base 36: mod_base = OTHER; note = 2'-O-methyl modified nucleotide
  modified_base 37: mod_base = OTHER; note = 2'-O-methyl modified nucleotide
  modified_base 38: mod_base = OTHER; note = 2'-O-methyl modified nucleotide
  modified_base 39: mod_base = OTHER; note = 2'-O-methyl modified nucleotide
  modified_base 40: mod_base = OTHER; note = 2'-O-methyl modified nucleotide
  modified_base 69: mod_base = OTHER; note = 2'-O-methyl modified nucleotide
  modified_base 70: mod_base = OTHER; note = 2'-O-methyl modified nucleotide
  modified_base 71: mod_base = OTHER; note = 2'-O-methyl modified nucleotide
  modified_base 72: mod_base = OTHER; note = 2'-O-methyl modified nucleotide
  modified_base 73: mod_base = OTHER; note = 2'-O-methyl modified nucleotide
  modified_base 74: mod_base = OTHER; note = 2'-O-methyl modified nucleotide
  modified_base 75: mod_base = OTHER; note = 2'-O-methyl modified nucleotide
  modified_base 76: mod_base = OTHER; note = 2'-O-methyl modified nucleotide
  modified_base 77: mod_base = OTHER; note = 2'-O-methyl modified nucleotide
  modified_base 78: mod_base = OTHER; note = 2'-O-methyl modified nucleotide
  modified_base 79: mod_base = OTHER; note = 2'-O-methyl modified nucleotide
  modified_base 80: mod_base = OTHER; note = 2'-O-methyl modified nucleotide
  modified_base 81: mod_base = OTHER; note = 2'-O-methyl modified nucleotide
  modified_base 82: mod_base = OTHER; note = 2'-O-methyl modified nucleotide
  modified_base 83: mod_base = OTHER; note = 2'-O-methyl modified nucleotide
  modified_base 84: mod_base = OTHER; note = 2'-O-methyl modified nucleotide
  modified_base 85: mod_base = OTHER; note = 2'-O-methyl modified nucleotide
  modified_base 86: mod_base = OTHER; note = 2'-O-methyl modified nucleotide
  modified_base 87: mod_base = OTHER; note = 2'-O-methyl modified nucleotide
  modified_base 88: mod_base = OTHER; note = 2'-O-methyl modified nucleotide
  modified_base 89: mod_base = OTHER; note = 2'-O-methyl modified nucleotide
  modified_base 90: mod_base = OTHER; note = 2'-O-methyl modified nucleotide
  modified_base 91: mod_base = OTHER; note = 2'-O-methyl modified nucleotide
  modified_base 92: mod_base = OTHER; note = 2'-O-methyl modified nucleotide
  modified_base 93: mod_base = OTHER; note = 2'-O-methyl modified nucleotide
  modified_base 94: mod_base = OTHER; note = 2'-O-methyl modified nucleotide
  modified_base 95: mod_base = OTHER; note = 2'-O-methyl modified nucleotide
  modified_base 96: mod_base = OTHER; note = 2'-O-methyl modified nucleotide
  modified_base 120: mod_base = OTHER; note = Nucleotide with phosphorothioate linkage
  modified_base 121: mod_base = OTHER; note = 2'-O-methyl modified nucleotide with phosphorothioate linkage
  modified_base 122: mod_base = OTHER; note = 2'-O-methyl modified nucleotide with phosphorothioate linkage
  modified_base 123: mod_base = OTHER; note = 2'-O-methyl modified nucleotide
gagaatcaaaatcggtgaatgttttagagctagaaatagcaagttaaaataaggctagtccgttatcaacttgaaaaagtggcaccgagtcggtgcgtctgcctatttaacccaccgattttg

SEQ ID NO: 16400 - RNA, 122 nt, synthetic construct
  source 1..122: mol_type = other RNA
  modified_base 1: mod_base = OTHER; note = 2'-O-methyl modified nucleotide with phosphorothioate linkage
  modified_base 2: mod_base = OTHER; note = 2'-O-methyl modified nucleotide with phosphorothioate linkage
  modified_base 3: mod_base = OTHER; note = 2'-O-methyl modified nucleotide with phosphorothioate linkage
  modified_base 29: mod_base = OTHER; note = 2'-O-methyl modified nucleotide
  modified_base 30: mod_base = OTHER; note = 2'-O-methyl modified nucleotide
  modified_base 31: mod_base = OTHER; note = 2'-O-methyl modified nucleotide
  modified_base 32: mod_base = OTHER; note = 2'-O-methyl modified nucleotide
  modified_base 33: mod_base = OTHER; note = 2'-O-methyl modified nucleotide
  modified_base 34: mod_base = OTHER; note = 2'-O-methyl modified nucleotide
  modified_base 35: mod_base = OTHER; note = 2'-O-methyl modified nucleotide
  modified_base 36: mod_base = OTHER; note = 2'-O-methyl modified nucleotide
  modified_base 37: mod_base = OTHER; note = 2'-O-methyl modified nucleotide
  modified_base 38: mod_base = OTHER; note = 2'-O-methyl modified nucleotide
  modified_base 39: mod_base = OTHER; note = 2'-O-methyl modified nucleotide
  modified_base 40: mod_base = OTHER; note = 2'-O-methyl modified nucleotide
  modified_base 69: mod_base = OTHER; note = 2'-O-methyl modified nucleotide
  modified_base 70: mod_base = OTHER; note = 2'-O-methyl modified nucleotide
  modified_base 71: mod_base = OTHER; note = 2'-O-methyl modified nucleotide
  modified_base 72: mod_base = OTHER; note = 2'-O-methyl modified nucleotide
  modified_base 73: mod_base = OTHER; note = 2'-O-methyl modified nucleotide
  modified_base 74: mod_base = OTHER; note = 2'-O-methyl modified nucleotide
  modified_base 75: mod_base = OTHER; note = 2'-O-methyl modified nucleotide
  modified_base 76: mod_base = OTHER; note = 2'-O-methyl modified nucleotide
  modified_base 77: mod_base = OTHER; note = 2'-O-methyl modified nucleotide
  modified_base 78: mod_base = OTHER; note = 2'-O-methyl modified nucleotide
  modified_base 79: mod_base = OTHER; note = 2'-O-methyl modified nucleotide
  modified_base 80: mod_base = OTHER; note = 2'-O-methyl modified nucleotide
  modified_base 81: mod_base = OTHER; note = 2'-O-methyl modified nucleotide
  modified_base 82: mod_base = OTHER; note = 2'-O-methyl modified nucleotide
  modified_base 83: mod_base = OTHER; note = 2'-O-methyl modified nucleotide
  modified_base 84: mod_base = OTHER; note = 2'-O-methyl modified nucleotide
  modified_base 85: mod_base = OTHER; note = 2'-O-methyl modified nucleotide
  modified_base 86: mod_base = OTHER; note = 2'-O-methyl modified nucleotide
  modified_base 87: mod_base = OTHER; note = 2'-O-methyl modified nucleotide
  modified_base 88: mod_base = OTHER; note = 2'-O-methyl modified nucleotide
  modified_base 89: mod_base = OTHER; note = 2'-O-methyl modified nucleotide
  modified_base 90: mod_base = OTHER; note = 2'-O-methyl modified nucleotide
  modified_base 91: mod_base = OTHER; note = 2'-O-methyl modified nucleotide
  modified_base 92: mod_base = OTHER; note = 2'-O-methyl modified nucleotide
  modified_base 93: mod_base = OTHER; note = 2'-O-methyl modified nucleotide
  modified_base 94: mod_base = OTHER; note = 2'-O-methyl modified nucleotide
  modified_base 95: mod_base = OTHER; note = 2'-O-methyl modified nucleotide
  modified_base 96: mod_base = OTHER; note = 2'-O-methyl modified nucleotide
  modified_base 119: mod_base = OTHER; note = Nucleotide with phosphorothioate linkage
  modified_base 120: mod_base = OTHER; note = 2'-O-methyl modified nucleotide with phosphorothioate linkage
  modified_base 121: mod_base = OTHER; note = 2'-O-methyl modified nucleotide with phosphorothioate linkage
  modified_base 122: mod_base = OTHER; note = 2'-O-methyl modified nucleotide
gagaatcaaaatcggtgaatgttttagagctagaaatagcaagttaaaataaggctagtccgttatcaacttgaaaaagtggcaccgagtcggtgcgtctgcctatttaacccaccgatttt

SEQ ID NO: 16401 - RNA, 121 nt, synthetic construct
  source 1..121: mol_type = other RNA
  modified_base 1: mod_base = OTHER; note = 2'-O-methyl modified nucleotide with phosphorothioate linkage
  modified_base 2: mod_base = OTHER; note = 2'-O-methyl modified nucleotide with phosphorothioate linkage
  modified_base 3: mod_base = OTHER; note = 2'-O-methyl modified nucleotide with phosphorothioate linkage
  modified_base 29: mod_base = OTHER; note = 2'-O-methyl modified nucleotide
  modified_base 30: mod_base = OTHER; note = 2'-O-methyl modified nucleotide
  modified_base 31: mod_base = OTHER; note = 2'-O-methyl modified nucleotide
  modified_base 32: mod_base = OTHER; note = 2'-O-methyl modified nucleotide
  modified_base 33: mod_base = OTHER; note = 2'-O-methyl modified nucleotide
  modified_base 34: mod_base = OTHER; note = 2'-O-methyl modified nucleotide
  modified_base 35: mod_base = OTHER; note = 2'-O-methyl modified nucleotide
  modified_base 36: mod_base = OTHER; note = 2'-O-methyl modified nucleotide
  modified_base 37: mod_base = OTHER; note = 2'-O-methyl modified nucleotide
  modified_base 38: mod_base = OTHER; note = 2'-O-methyl modified nucleotide
  modified_base 39: mod_base = OTHER; note = 2'-O-methyl modified nucleotide
  modified_base 40: mod_base = OTHER; note = 2'-O-methyl modified nucleotide
  modified_base 69: mod_base = OTHER; note = 2'-O-methyl modified nucleotide
  modified_base 70: mod_base = OTHER; note = 2'-O-methyl modified nucleotide
  modified_base 71: mod_base = OTHER; note = 2'-O-methyl modified nucleotide
  modified_base 72: mod_base = OTHER; note = 2'-O-methyl modified nucleotide
  modified_base 73: mod_base = OTHER; note = 2'-O-methyl modified nucleotide
  modified_base 74: mod_base = OTHER; note = 2'-O-methyl modified nucleotide
  modified_base 75: mod_base = OTHER; note = 2'-O-methyl modified nucleotide
  modified_base 76: mod_base = OTHER; note = 2'-O-methyl modified nucleotide
  modified_base 77: mod_base = OTHER; note = 2'-O-methyl modified nucleotide
  modified_base 78: mod_base = OTHER; note = 2'-O-methyl modified nucleotide
  modified_base 79: mod_base = OTHER; note = 2'-O-methyl modified nucleotide
  modified_base 80: mod_base = OTHER; note = 2'-O-methyl modified nucleotide
  modified_base 81: mod_base = OTHER; note = 2'-O-methyl modified nucleotide
  modified_base 82: mod_base = OTHER; note = 2'-O-methyl modified nucleotide
  modified_base 83: mod_base = OTHER; note = 2'-O-methyl modified nucleotide
  modified_base 84: mod_base = OTHER; note = 2'-O-methyl modified nucleotide
  modified_base 85: mod_base = OTHER; note = 2'-O-methyl modified nucleotide
  modified_base 86: mod_base = OTHER; note = 2'-O-methyl modified nucleotide
  modified_base 87: mod_base = OTHER; note = 2'-O-methyl modified nucleotide
  modified_base 88: mod_base = OTHER; note = 2'-O-methyl modified nucleotide
  modified_base 89: mod_base = OTHER; note = 2'-O-methyl modified nucleotide
  modified_base 90: mod_base = OTHER; note = 2'-O-methyl modified nucleotide
  modified_base 91: mod_base = OTHER; note = 2'-O-methyl modified nucleotide
  modified_base 92: mod_base = OTHER; note = 2'-O-methyl modified nucleotide
  modified_base 93: mod_base = OTHER; note = 2'-O-methyl modified nucleotide
  modified_base 94: mod_base = OTHER; note = 2'-O-methyl modified nucleotide
  modified_base 95: mod_base = OTHER; note = 2'-O-methyl modified nucleotide
  modified_base 96: mod_base = OTHER; note = 2'-O-methyl modified nucleotide
  modified_base 118: mod_base = OTHER; note = Nucleotide with phosphorothioate linkage
  modified_base 119: mod_base = OTHER; note = 2'-O-methyl modified nucleotide with phosphorothioate linkage
  modified_base 120: mod_base = OTHER; note = 2'-O-methyl modified nucleotide with phosphorothioate linkage
  modified_base 121: mod_base = OTHER; note = 2'-O-methyl modified nucleotide
gagaatcaaaatcggtgaatgttttagagctagaaatagcaagttaaaataaggctagtccgttatcaacttgaaaaagtggcaccgagtcggtgcgtctgcctatttaacccaccgattt

SEQ ID NO: 16402 - RNA, 120 nt, synthetic construct
  source 1..120: mol_type = other RNA
  modified_base 1: mod_base = OTHER; note = 2'-O-methyl modified nucleotide with phosphorothioate linkage
  modified_base 2: mod_base = OTHER; note = 2'-O-methyl modified nucleotide with phosphorothioate linkage
  modified_base 3: mod_base = OTHER; note = 2'-O-methyl modified nucleotide with phosphorothioate linkage
  modified_base 29: mod_base = OTHER; note = 2'-O-methyl modified nucleotide
  modified_base 30: mod_base = OTHER; note = 2'-O-methyl modified nucleotide
  modified_base 31: mod_base = OTHER; note = 2'-O-methyl modified nucleotide
  modified_base 32: mod_base = OTHER; note = 2'-O-methyl modified nucleotide
  modified_base 33: mod_base = OTHER; note = 2'-O-methyl modified nucleotide
  modified_base 34: mod_base = OTHER; note = 2'-O-methyl modified nucleotide
  modified_base 35: mod_base = OTHER; note = 2'-O-methyl modified nucleotide
  modified_base 36: mod_base = OTHER; note = 2'-O-methyl modified nucleotide
  modified_base 37: mod_base = OTHER; note = 2'-O-methyl modified nucleotide
  modified_base 38: mod_base = OTHER; note = 2'-O-methyl modified nucleotide
  modified_base 39: mod_base = OTHER; note = 2'-O-methyl modified nucleotide
  modified_base 40: mod_base = OTHER; note = 2'-O-methyl modified nucleotide
  modified_base 69: mod_base = OTHER; note = 2'-O-methyl modified nucleotide
  modified_base 70: mod_base = OTHER; note = 2'-O-methyl modified nucleotide
  modified_base 71: mod_base = OTHER; note = 2'-O-methyl modified nucleotide
  modified_base 72: mod_base = OTHER; note = 2'-O-methyl modified nucleotide
  modified_base 73: mod_base = OTHER; note = 2'-O-methyl modified nucleotide
  modified_base 74: mod_base = OTHER; note = 2'-O-methyl modified nucleotide
  modified_base 75: mod_base = OTHER; note = 2'-O-methyl modified nucleotide
  modified_base 76: mod_base = OTHER; note = 2'-O-methyl modified nucleotide
  modified_base 77: mod_base = OTHER; note = 2'-O-methyl modified nucleotide
  modified_base 78: mod_base = OTHER; note = 2'-O-methyl modified nucleotide
  modified_base 79: mod_base = OTHER; note = 2'-O-methyl modified nucleotide
  modified_base 80: mod_base = OTHER; note = 2'-O-methyl modified nucleotide
  modified_base 81: mod_base = OTHER; note = 2'-O-methyl modified nucleotide
  modified_base 82: mod_base = OTHER; note = 2'-O-methyl modified nucleotide
  modified_base 83: mod_base = OTHER; note = 2'-O-methyl modified nucleotide
  modified_base 84: mod_base = OTHER; note = 2'-O-methyl modified nucleotide
  modified_base 85: mod_base = OTHER; note = 2'-O-methyl modified nucleotide
  modified_base 86: mod_base = OTHER; note = 2'-O-methyl modified nucleotide
  modified_base 87: mod_base = OTHER; note = 2'-O-methyl modified nucleotide
  modified_base 88: mod_base = OTHER; note = 2'-O-methyl modified nucleotide
  modified_base 89: mod_base = OTHER; note = 2'-O-methyl modified nucleotide
  modified_base 90: mod_base = OTHER; note = 2'-O-methyl modified nucleotide
  modified_base 91: mod_base = OTHER; note = 2'-O-methyl modified nucleotide
  modified_base 92: mod_base = OTHER; note = 2'-O-methyl modified nucleotide
  modified_base 93: mod_base = OTHER; note = 2'-O-methyl modified nucleotide
  modified_base 94: mod_base = OTHER; note = 2'-O-methyl modified nucleotide
  modified_base 95: mod_base = OTHER; note = 2'-O-methyl modified nucleotide
  modified_base 96: mod_base = OTHER; note = 2'-O-methyl modified nucleotide
  modified_base 117: mod_base = OTHER; note = Nucleotide with phosphorothioate linkage
  modified_base 118: mod_base = OTHER; note = 2'-O-methyl modified nucleotide with phosphorothioate linkage
  modified_base 119: mod_base = OTHER; note = 2'-O-methyl modified nucleotide with phosphorothioate linkage
  modified_base 120: mod_base = OTHER; note = 2'-O-methyl modified nucleotide
gagaatcaaaatcggtgaatgttttagagctagaaatagcaagttaaaataaggctagtccgttatcaacttgaaaaagtggcaccgagtcggtgcgtctgcctatttaacccaccgatt

SEQ ID NO: 16403 - RNA, 127 nt, synthetic construct
  source 1..127: mol_type = other RNA
  modified_base 1: mod_base = OTHER; note = 2'-O-methyl modified nucleotide with phosphorothioate linkage
  modified_base 2: mod_base = OTHER; note = 2'-O-methyl modified nucleotide with phosphorothioate linkage
  modified_base 3: mod_base = OTHER; note = 2'-O-methyl modified nucleotide with phosphorothioate linkage
  modified_base 29: mod_base = OTHER; note = 2'-O-methyl modified nucleotide
  modified_base 30: mod_base = OTHER; note = 2'-O-methyl modified nucleotide
  modified_base 31: mod_base = OTHER; note = 2'-O-methyl modified nucleotide
  modified_base 32: mod_base = OTHER; note = 2'-O-methyl modified nucleotide
  modified_base 33: mod_base = OTHER; note = 2'-O-methyl modified nucleotide
  modified_base 34: mod_base = OTHER; note = 2'-O-methyl modified nucleotide
  modified_base 35: mod_base = OTHER; note = 2'-O-methyl modified nucleotide
  modified_base 36: mod_base = OTHER; note = 2'-O-methyl modified nucleotide
  modified_base 37: mod_base = OTHER; note = 2'-O-methyl modified nucleotide
  modified_base 38: mod_base = OTHER; note = 2'-O-methyl modified nucleotide
  modified_base 39: mod_base = OTHER; note = 2'-O-methyl modified nucleotide
  modified_base 40: mod_base = OTHER; note = 2'-O-methyl modified nucleotide
  modified_base 69: mod_base = OTHER; note = 2'-O-methyl modified nucleotide
  modified_base 70: mod_base = OTHER; note = 2'-O-methyl modified nucleotide
  modified_base 71: mod_base = OTHER; note = 2'-O-methyl modified nucleotide
  modified_base 72: mod_base = OTHER; note = 2'-O-methyl modified nucleotide
  modified_base 73: mod_base = OTHER; note = 2'-O-methyl modified nucleotide
  modified_base 74: mod_base = OTHER; note = 2'-O-methyl modified nucleotide
  modified_base 75: mod_base = OTHER; note = 2'-O-methyl modified nucleotide
  modified_base 76: mod_base = OTHER; note = 2'-O-methyl modified nucleotide
  modified_base 77: mod_base = OTHER; note = 2'-O-methyl modified nucleotide
  modified_base 78: mod_base = OTHER; note = 2'-O-methyl modified nucleotide
  modified_base 79: mod_base = OTHER; note = 2'-O-methyl modified nucleotide
  modified_base 80: mod_base = OTHER; note = 2'-O-methyl modified nucleotide
  modified_base 81: mod_base = OTHER; note = 2'-O-methyl modified nucleotide
  modified_base 82: mod_base = OTHER; note = 2'-O-methyl modified nucleotide
  modified_base 83: mod_base = OTHER; note = 2'-O-methyl modified nucleotide
  modified_base 84: mod_base = OTHER; note = 2'-O-methyl modified nucleotide
  modified_base 85: mod_base = OTHER; note = 2'-O-methyl modified nucleotide
  modified_base 86: mod_base = OTHER; note = 2'-O-methyl modified nucleotide
  modified_base 87: mod_base = OTHER; note = 2'-O-methyl modified nucleotide
  modified_base 88: mod_base = OTHER; note = 2'-O-methyl modified nucleotide
  modified_base 89: mod_base = OTHER; note = 2'-O-methyl modified nucleotide
  modified_base 90: mod_base = OTHER; note = 2'-O-methyl modified nucleotide
  modified_base 91: mod_base = OTHER; note = 2'-O-methyl modified nucleotide
  modified_base 92: mod_base = OTHER; note = 2'-O-methyl modified nucleotide
  modified_base 93: mod_base = OTHER; note = 2'-O-methyl modified nucleotide
  modified_base 94: mod_base = OTHER; note = 2'-O-methyl modified nucleotide
  modified_base 95: mod_base = OTHER; note = 2'-O-methyl modified nucleotide
  modified_base 96: mod_base = OTHER; note = 2'-O-methyl modified nucleotide
  modified_base 124: mod_base = OTHER; note = Nucleotide with phosphorothioate linkage
  modified_base 125: mod_base = OTHER; note = 2'-O-methyl modified nucleotide with phosphorothioate linkage
  modified_base 126: mod_base = OTHER; note = 2'-O-methyl modified nucleotide with phosphorothioate linkage
  modified_base 127: mod_base = OTHER; note = 2'-O-methyl modified nucleotide
gagaatcaaaatcggtgaatgttttagagctagaaatagcaagttaaaataaggctagtccgttatcaacttgaaaaagtggcaccgagtcggtgcctgtctgcctatttaacccaccgattttgat

SEQ ID NO: 16404 - RNA, 126 nt, synthetic construct
  source 1..126: mol_type = other RNA
  modified_base 1: mod_base = OTHER; note = 2'-O-methyl modified nucleotide with phosphorothioate linkage
  modified_base 2: mod_base = OTHER; note = 2'-O-methyl modified nucleotide with phosphorothioate linkage
  modified_base 3: mod_base = OTHER; note = 2'-O-methyl modified nucleotide with phosphorothioate linkage
  modified_base 29: mod_base = OTHER; note = 2'-O-methyl modified nucleotide
  modified_base 30: mod_base = OTHER; note = 2'-O-methyl modified nucleotide
  modified_base 31: mod_base = OTHER; note = 2'-O-methyl modified nucleotide
  modified_base 32: mod_base = OTHER; note = 2'-O-methyl modified nucleotide
  modified_base 33: mod_base = OTHER; note = 2'-O-methyl modified nucleotide
  modified_base 34: mod_base = OTHER; note = 2'-O-methyl modified nucleotide
  modified_base 35: mod_base = OTHER; note = 2'-O-methyl modified nucleotide
  modified_base 36: mod_base = OTHER; note = 2'-O-methyl modified nucleotide
  modified_base 37: mod_base = OTHER; note = 2'-O-methyl modified nucleotide
  modified_base 38: mod_base = OTHER; note = 2'-O-methyl modified nucleotide
  modified_base 39: mod_base = OTHER; note = 2'-O-methyl modified nucleotide
  modified_base 40: mod_base = OTHER; note = 2'-O-methyl modified nucleotide
  modified_base 69: mod_base = OTHER; note = 2'-O-methyl modified nucleotide
  modified_base 70: mod_base = OTHER; note = 2'-O-methyl modified nucleotide
  modified_base 71: mod_base = OTHER; note = 2'-O-methyl modified nucleotide
  modified_base 72: mod_base = OTHER; note = 2'-O-methyl modified nucleotide
  modified_base 73: mod_base = OTHER; note = 2'-O-methyl modified nucleotide
  modified_base 74: mod_base = OTHER; note = 2'-O-methyl modified nucleotide
  modified_base 75: mod_base = OTHER; note = 2'-O-methyl modified nucleotide
  modified_base 76: mod_base = OTHER; note = 2'-O-methyl modified nucleotide
  modified_base 77: mod_base = OTHER; note = 2'-O-methyl modified nucleotide
  modified_base 78: mod_base = OTHER; note = 2'-O-methyl modified nucleotide
  modified_base 79: mod_base = OTHER; note = 2'-O-methyl modified nucleotide
  modified_base 80: mod_base = OTHER; note = 2'-O-methyl modified nucleotide
  modified_base 81: mod_base = OTHER; note = 2'-O-methyl modified nucleotide
  modified_base 82: mod_base = OTHER; note = 2'-O-methyl modified nucleotide
  modified_base 83: mod_base = OTHER; note = 2'-O-methyl modified nucleotide
  modified_base 84: mod_base = OTHER; note = 2'-O-methyl modified nucleotide
  modified_base 85: mod_base = OTHER; note = 2'-O-methyl modified nucleotide
  modified_base 86: mod_base = OTHER; note = 2'-O-methyl modified nucleotide
  modified_base 87: mod_base = OTHER; note = 2'-O-methyl modified nucleotide
  modified_base 88: mod_base = OTHER; note = 2'-O-methyl modified nucleotide
  modified_base 89: mod_base = OTHER; note = 2'-O-methyl modified nucleotide
  modified_base 90: mod_base = OTHER; note = 2'-O-methyl modified nucleotide
  modified_base 91: mod_base = OTHER; note = 2'-O-methyl modified nucleotide
  modified_base 92: mod_base = OTHER; note = 2'-O-methyl modified nucleotide
  modified_base 93: mod_base = OTHER; note = 2'-O-methyl modified nucleotide
  modified_base 94: mod_base = OTHER; note = 2'-O-methyl modified nucleotide
  modified_base 95: mod_base = OTHER; note = 2'-O-methyl modified nucleotide
  modified_base 96: mod_base = OTHER; note = 2'-O-methyl modified nucleotide
  modified_base 123: mod_base = OTHER; note = Nucleotide with phosphorothioate linkage
  modified_base 124: mod_base = OTHER; note = 2'-O-methyl modified nucleotide with phosphorothioate linkage
  modified_base 125: mod_base = OTHER; note = 2'-O-methyl modified nucleotide with phosphorothioate linkage
  modified_base 126: mod_base = OTHER; note = 2'-O-methyl modified nucleotide
gagaatcaaaatcggtgaatgttttagagctagaaatagcaagttaaaataaggctagtccgttatcaacttgaaaaagtggcaccgagtcggtgcctgtctgcctatttaacccaccgattttga

SEQ ID NO: 16405 - RNA, 125 nt, synthetic construct
  source 1..125: mol_type = other RNA
  modified_base 1: mod_base = OTHER; note = 2'-O-methyl modified nucleotide with phosphorothioate linkage
  modified_base 2: mod_base = OTHER; note = 2'-O-methyl modified nucleotide with phosphorothioate linkage
  modified_base 3: mod_base = OTHER; note = 2'-O-methyl modified nucleotide with phosphorothioate linkage
  modified_base 29: mod_base = OTHER; note = 2'-O-methyl modified nucleotide
  modified_base 30: mod_base = OTHER; note = 2'-O-methyl modified nucleotide
  modified_base 31: mod_base = OTHER; note = 2'-O-methyl modified nucleotide
  modified_base 32: mod_base = OTHER; note = 2'-O-methyl modified nucleotide
  modified_base 33: mod_base = OTHER; note = 2'-O-methyl modified nucleotide
  modified_base 34: mod_base = OTHER; note = 2'-O-methyl modified nucleotide
  modified_base 35: mod_base = OTHER; note = 2'-O-methyl modified nucleotide
  modified_base 36: mod_base = OTHER; note = 2'-O-methyl modified nucleotide
  modified_base 37: mod_base = OTHER; note = 2'-O-methyl modified nucleotide
  modified_base 38: mod_base = OTHER; note = 2'-O-methyl modified nucleotide
  modified_base 39: mod_base = OTHER; note = 2'-O-methyl modified nucleotide
  modified_base 40: mod_base = OTHER; note = 2'-O-methyl modified nucleotide
  modified_base 69: mod_base = OTHER; note = 2'-O-methyl modified nucleotide
  modified_base 70: mod_base = OTHER; note = 2'-O-methyl modified nucleotide
  modified_base 71: mod_base = OTHER; note = 2'-O-methyl modified nucleotide
  modified_base 72: mod_base = OTHER; note = 2'-O-methyl modified nucleotide
  modified_base 73: mod_base = OTHER; note = 2'-O-methyl modified nucleotide
  modified_base 74: mod_base = OTHER; note = 2'-O-methyl modified nucleotide
  modified_base 75: mod_base = OTHER; note = 2'-O-methyl modified nucleotide
  modified_base 76: mod_base = OTHER; note = 2'-O-methyl modified nucleotide
  modified_base 77: mod_base = OTHER; note = 2'-O-methyl modified nucleotide
  modified_base 78: mod_base = OTHER; note = 2'-O-methyl modified nucleotide
  modified_base 79: mod_base = OTHER; note = 2'-O-methyl modified nucleotide
  modified_base 80: mod_base = OTHER; note = 2'-O-methyl modified nucleotide
  modified_base 81: mod_base = OTHER; note = 2'-O-methyl modified nucleotide
  modified_base 82: mod_base = OTHER; note = 2'-O-methyl modified nucleotide
  modified_base 83: mod_base = OTHER; note = 2'-O-methyl modified nucleotide
  modified_base 84: mod_base = OTHER; note = 2'-O-methyl modified nucleotide
  modified_base 85: mod_base = OTHER; note = 2'-O-methyl modified nucleotide
  modified_base 86: mod_base = OTHER; note = 2'-O-methyl modified nucleotide
  modified_base 87: mod_base = OTHER; note = 2'-O-methyl modified nucleotide
  modified_base 88: mod_base = OTHER; note = 2'-O-methyl modified nucleotide
  modified_base 89: mod_base = OTHER; note = 2'-O-methyl modified nucleotide
  modified_base 90: mod_base = OTHER; note = 2'-O-methyl modified nucleotide
  modified_base 91: mod_base = OTHER; note = 2'-O-methyl modified nucleotide
  modified_base 92: mod_base = OTHER; note = 2'-O-methyl modified nucleotide
  modified_base 93: mod_base = OTHER; note = 2'-O-methyl modified nucleotide
  modified_base 94: mod_base = OTHER; note = 2'-O-methyl modified nucleotide
  modified_base 95: mod_base = OTHER; note = 2'-O-methyl modified nucleotide
  modified_base 96: mod_base = OTHER; note = 2'-O-methyl modified nucleotide
  modified_base 122: mod_base = OTHER; note = Nucleotide with phosphorothioate linkage
  modified_base 123: mod_base = OTHER; note = 2'-O-methyl modified nucleotide with phosphorothioate linkage
  modified_base 124: mod_base = OTHER; note = 2'-O-methyl modified nucleotide with phosphorothioate linkage
  modified_base 125: mod_base = OTHER; note = 2'-O-methyl modified nucleotide
gagaatcaaaatcggtgaatgttttagagctagaaatagcaagttaaaataaggctagtccgttatcaacttgaaaaagtggcaccgagtcggtgcctgtctgcctatttaacccaccgattttg

SEQ ID NO: 16406 - RNA, 124 nt, synthetic construct
  source 1..124: mol_type = other RNA
  modified_base 1: mod_base = OTHER; note = 2'-O-methyl modified nucleotide with phosphorothioate linkage
  modified_base 2: mod_base = OTHER; note = 2'-O-methyl modified nucleotide with phosphorothioate linkage
  modified_base 3: mod_base = OTHER; note = 2'-O-methyl modified nucleotide with phosphorothioate linkage
  modified_base 29: mod_base = OTHER; note = 2'-O-methyl modified nucleotide
  modified_base 30: mod_base = OTHER; note = 2'-O-methyl modified nucleotide
  modified_base 31: mod_base = OTHER; note = 2'-O-methyl modified nucleotide
  modified_base 32: mod_base = OTHER; note = 2'-O-methyl modified nucleotide
  modified_base 33: mod_base = OTHER; note = 2'-O-methyl modified nucleotide
  modified_base 34: mod_base = OTHER; note = 2'-O-methyl modified nucleotide
  modified_base 35: mod_base = OTHER; note = 2'-O-methyl modified nucleotide
  modified_base 36: mod_base = OTHER; note = 2'-O-methyl modified nucleotide
  modified_base 37: mod_base = OTHER; note = 2'-O-methyl modified nucleotide
  modified_base 38: mod_base = OTHER; note = 2'-O-methyl modified nucleotide
  modified_base 39: mod_base = OTHER; note = 2'-O-methyl modified nucleotide
  modified_base 40: mod_base = OTHER; note = 2'-O-methyl modified nucleotide
  modified_base 69: mod_base = OTHER; note = 2'-O-methyl modified nucleotide
  modified_base 70: mod_base = OTHER; note = 2'-O-methyl modified nucleotide
  modified_base 71: mod_base = OTHER; note = 2'-O-methyl modified nucleotide
  modified_base 72: mod_base = OTHER; note = 2'-O-methyl modified nucleotide
  modified_base 73: mod_base = OTHER; note = 2'-O-methyl modified nucleotide
  modified_base 74: mod_base = OTHER; note = 2'-O-methyl modified nucleotide
  modified_base 75: mod_base = OTHER; note = 2'-O-methyl modified nucleotide
  modified_base 76: mod_base = OTHER; note = 2'-O-methyl modified nucleotide
  modified_base 77: mod_base = OTHER; note = 2'-O-methyl modified nucleotide
  modified_base 78: mod_base = OTHER; note = 2'-O-methyl modified nucleotide
  modified_base 79: mod_base = OTHER; note = 2'-O-methyl modified nucleotide
  modified_base 80: mod_base = OTHER; note = 2'-O-methyl modified nucleotide
  modified_base 81: mod_base = OTHER; note = 2'-O-methyl modified nucleotide
  modified_base 82: mod_base = OTHER; note = 2'-O-methyl modified nucleotide
  modified_base 83: mod_base = OTHER; note = 2'-O-methyl modified nucleotide
  modified_base 84: mod_base = OTHER; note = 2'-O-methyl modified nucleotide
  modified_base 85: mod_base = OTHER; note = 2'-O-methyl modified nucleotide
  modified_base 86: mod_base = OTHER; note = 2'-O-methyl modified nucleotide
  modified_base 87: mod_base = OTHER; note = 2'-O-methyl modified nucleotide
  modified_base 88: mod_base = OTHER; note = 2'-O-methyl modified nucleotide
  modified_base 89: mod_base = OTHER; note = 2'-O-methyl modified nucleotide
  modified_base 90: mod_base = OTHER; note = 2'-O-methyl modified nucleotide
  modified_base 91: mod_base = OTHER; note = 2'-O-methyl modified nucleotide
  modified_base 92: mod_base = OTHER; note = 2'-O-methyl modified nucleotide
  modified_base 93: mod_base = OTHER; note = 2'-O-methyl modified nucleotide
  modified_base 94: mod_base = OTHER; note = 2'-O-methyl modified nucleotide
  modified_base 95: mod_base = OTHER; note = 2'-O-methyl modified nucleotide
  modified_base 96: mod_base = OTHER; note = 2'-O-methyl modified nucleotide
  modified_base 121: mod_base = OTHER; note = Nucleotide with phosphorothioate linkage
  modified_base 122: mod_base = OTHER; note = 2'-O-methyl modified nucleotide with phosphorothioate linkage
  modified_base 123: mod_base = OTHER; note = 2'-O-methyl modified nucleotide with phosphorothioate linkage
  modified_base 124: mod_base = OTHER; note = 2'-O-methyl modified nucleotide
gagaatcaaaatcggtgaatgttttagagctagaaatagcaagttaaaataaggctagtccgttatcaacttgaaaaagtggcaccgagtcggtgcctgtctgcctatttaacccaccgatttt

SEQ ID NO: 16407 - RNA, 123 nt, synthetic construct
  source 1..123: mol_type = other RNA
  modified_base 1: mod_base = OTHER; note = 2'-O-methyl modified nucleotide with phosphorothioate linkage
  modified_base 2: mod_base = OTHER; note = 2'-O-methyl modified nucleotide with phosphorothioate linkage
  modified_base 3: mod_base = OTHER; note = 2'-O-methyl modified nucleotide with phosphorothioate linkage
  modified_base 29: mod_base = OTHER; note = 2'-O-methyl modified nucleotide
  modified_base 30: mod_base = OTHER; note = 2'-O-methyl modified nucleotide
  modified_base 31: mod_base = OTHER; note = 2'-O-methyl modified nucleotide
  modified_base 32: mod_base = OTHER; note = 2'-O-methyl modified nucleotide
  modified_base 33: mod_base = OTHER; note = 2'-O-methyl modified nucleotide
  modified_base 34: mod_base = OTHER; note = 2'-O-methyl modified nucleotide
  modified_base 35: mod_base = OTHER; note = 2'-O-methyl modified nucleotide
  modified_base 36: mod_base = OTHER; note = 2'-O-methyl modified nucleotide
  modified_base 37: mod_base = OTHER; note = 2'-O-methyl modified nucleotide
  modified_base 38: mod_base = OTHER; note = 2'-O-methyl modified nucleotide
  modified_base 39: mod_base = OTHER; note = 2'-O-methyl modified nucleotide
  modified_base 40: mod_base = OTHER; note = 2'-O-methyl modified nucleotide
  modified_base 69: mod_base = OTHER; note = 2'-O-methyl modified nucleotide
  modified_base 70: mod_base = OTHER; note = 2'-O-methyl modified nucleotide
  modified_base 71: mod_base = OTHER; note = 2'-O-methyl modified nucleotide
  modified_base 72: mod_base = OTHER; note = 2'-O-methyl modified nucleotide
  modified_base 73: mod_base = OTHER; note = 2'-O-methyl modified nucleotide
  modified_base 74: mod_base = OTHER; note = 2'-O-methyl modified nucleotide
  modified_base 75: mod_base = OTHER; note = 2'-O-methyl modified nucleotide
  modified_base 76: mod_base = OTHER; note = 2'-O-methyl modified nucleotide
  modified_base 77: mod_base = OTHER; note = 2'-O-methyl modified nucleotide
  modified_base 78: mod_base = OTHER; note = 2'-O-methyl modified nucleotide
  modified_base 79: mod_base = OTHER; note = 2'-O-methyl modified nucleotide
  modified_base 80: mod_base = OTHER; note = 2'-O-methyl modified nucleotide
  modified_base 81: mod_base = OTHER; note = 2'-O-methyl modified nucleotide
  modified_base 82: mod_base = OTHER; note = 2'-O-methyl modified nucleotide
  modified_base 83: mod_base = OTHER; note = 2'-O-methyl modified nucleotide
  modified_base 84: mod_base = OTHER; note = 2'-O-methyl modified nucleotide
  modified_base 85: mod_base = OTHER; note = 2'-O-methyl modified nucleotide
  modified_base 86: mod_base = OTHER; note = 2'-O-methyl modified nucleotide
  modified_base 87: mod_base = OTHER; note = 2'-O-methyl modified nucleotide
  modified_base 88: mod_base = OTHER; note = 2'-O-methyl modified nucleotide
  modified_base 89: mod_base = OTHER; note = 2'-O-methyl modified nucleotide
  modified_base 90: mod_base = OTHER; note = 2'-O-methyl modified nucleotide
  modified_base 91: mod_base = OTHER; note = 2'-O-methyl modified nucleotide
  modified_base 92: mod_base = OTHER; note = 2'-O-methyl modified nucleotide
  modified_base 93: mod_base = OTHER; note = 2'-O-methyl modified nucleotide
  modified_base 94: mod_base = OTHER; note = 2'-O-methyl modified nucleotide
  modified_base 95: mod_base = OTHER; note = 2'-O-methyl modified nucleotide
  modified_base 96: mod_base = OTHER; note = 2'-O-methyl modified nucleotide
  modified_base 120: mod_base = OTHER; note = Nucleotide with phosphorothioate linkage
  modified_base 121: mod_base = OTHER; note = 2'-O-methyl modified nucleotide with phosphorothioate linkage
  modified_base 122: mod_base = OTHER; note = 2'-O-methyl modified nucleotide with phosphorothioate linkage
  modified_base 123: mod_base = OTHER; note = 2'-O-methyl modified nucleotide
gagaatcaaaatcggtgaatgttttagagctagaaatagcaagttaaaataaggctagtccgttatcaacttgaaaaagtggcaccgagtcggtgcctgtctgcctatttaacccaccgattt

SEQ ID NO: 16408 - RNA, 122 nt, synthetic construct
  source 1..122: mol_type = other RNA
  modified_base 1: mod_base = OTHER; note = 2'-O-methyl modified nucleotide with phosphorothioate linkage
  modified_base 2: mod_base = OTHER; note = 2'-O-methyl modified nucleotide with phosphorothioate linkage
  modified_base 3: mod_base = OTHER; note = 2'-O-methyl modified nucleotide with phosphorothioate linkage
  modified_base 29: mod_base = OTHER; note = 2'-O-methyl modified nucleotide
  modified_base 30: mod_base = OTHER; note = 2'-O-methyl modified nucleotide
  modified_base 31: mod_base = OTHER; note = 2'-O-methyl modified nucleotide
  modified_base 32: mod_base = OTHER; note = 2'-O-methyl modified nucleotide
  modified_base 33: mod_base = OTHER; note = 2'-O-methyl modified nucleotide
  modified_base 34: mod_base = OTHER; note = 2'-O-methyl modified nucleotide
  modified_base 35: mod_base = OTHER; note = 2'-O-methyl modified nucleotide
  modified_base 36: mod_base = OTHER; note = 2'-O-methyl modified nucleotide
  modified_base 37: mod_base = OTHER; note = 2'-O-methyl modified nucleotide
  modified_base 38: mod_base = OTHER; note = 2'-O-methyl modified nucleotide
  modified_base 39: mod_base = OTHER; note = 2'-O-methyl modified nucleotide
  modified_base 40: mod_base = OTHER; note = 2'-O-methyl modified nucleotide
  modified_base 69: mod_base = OTHER; note = 2'-O-methyl modified nucleotide
  modified_base 70: mod_base = OTHER; note = 2'-O-methyl modified nucleotide
  modified_base 71: mod_base = OTHER; note = 2'-O-methyl modified nucleotide
  modified_base 72: mod_base = OTHER; note = 2'-O-methyl modified nucleotide
  modified_base 73: mod_base = OTHER; note = 2'-O-methyl modified nucleotide
  modified_base 74: mod_base = OTHER; note = 2'-O-methyl modified nucleotide
  modified_base 75: mod_base = OTHER; note = 2'-O-methyl modified nucleotide
  modified_base 76: mod_base = OTHER; note = 2'-O-methyl modified nucleotide
  modified_base 77: mod_base = OTHER; note = 2'-O-methyl modified nucleotide
  modified_base 78: mod_base = OTHER; note = 2'-O-methyl modified nucleotide
  modified_base 79: mod_base = OTHER; note = 2'-O-methyl modified nucleotide
  modified_base 80: mod_base = OTHER; note = 2'-O-methyl modified nucleotide
  modified_base 81: mod_base = OTHER; note = 2'-O-methyl modified nucleotide
  modified_base 82: mod_base = OTHER; note = 2'-O-methyl modified nucleotide
  modified_base 83: mod_base = OTHER; note = 2'-O-methyl modified nucleotide
  modified_base 84: mod_base = OTHER; note = 2'-O-methyl modified nucleotide
  modified_base 85: mod_base = OTHER; note = 2'-O-methyl modified nucleotide
  modified_base 86: mod_base = OTHER; note = 2'-O-methyl modified nucleotide
  modified_base 87: mod_base = OTHER; note = 2'-O-methyl modified nucleotide
  modified_base 88: mod_base = OTHER; note = 2'-O-methyl modified nucleotide
  modified_base 89: mod_base = OTHER; note = 2'-O-methyl modified nucleotide
  modified_base 90: mod_base = OTHER; note = 2'-O-methyl modified nucleotide
  modified_base 91: mod_base = OTHER; note = 2'-O-methyl modified nucleotide
  modified_base 92: mod_base = OTHER; note = 2'-O-methyl modified nucleotide
  modified_base 93: mod_base = OTHER; note = 2'-O-methyl modified nucleotide
  modified_base 94: mod_base = OTHER; note = 2'-O-methyl modified nucleotide
  modified_base 95: mod_base = OTHER; note = 2'-O-methyl modified nucleotide
  modified_base 96: mod_base = OTHER; note = 2'-O-methyl modified nucleotide
  modified_base 119: mod_base = OTHER; note = Nucleotide with phosphorothioate linkage
  modified_base 120: mod_base = OTHER; note = 2'-O-methyl modified nucleotide with phosphorothioate linkage
  modified_base 121: mod_base = OTHER; note = 2'-O-methyl modified nucleotide with phosphorothioate linkage
  modified_base 122: mod_base = OTHER; note = 2'-O-methyl modified nucleotide
gagaatcaaaatcggtgaatgttttagagctagaaatagcaagttaaaataaggctagtccgttatcaacttgaaaaagtggcaccgagtcggtgcctgtctgcctatttaacccaccgatt

SEQ ID NO: 16409 - RNA, 129 nt, synthetic construct
  source 1..129: mol_type = other RNA
  modified_base 1: mod_base = OTHER; note = 2'-O-methyl modified nucleotide with phosphorothioate linkage
  modified_base 2: mod_base = OTHER; note = 2'-O-methyl modified nucleotide with phosphorothioate linkage
  modified_base 3: mod_base = OTHER; note = 2'-O-methyl modified nucleotide with phosphorothioate linkage
  modified_base 29: mod_base = OTHER; note = 2'-O-methyl modified nucleotide
  modified_base 30: mod_base = OTHER; note = 2'-O-methyl modified nucleotide
  modified_base 31: mod_base = OTHER; note = 2'-O-methyl modified nucleotide
  modified_base 32: mod_base = OTHER; note = 2'-O-methyl modified nucleotide
  modified_base 33: mod_base = OTHER; note = 2'-O-methyl modified nucleotide
  modified_base 34: mod_base = OTHER; note = 2'-O-methyl modified nucleotide
  modified_base 35: mod_base = OTHER; note = 2'-O-methyl modified nucleotide
  modified_base 36: mod_base = OTHER; note = 2'-O-methyl modified nucleotide
  modified_base 37: mod_base = OTHER; note = 2'-O-methyl modified nucleotide
  modified_base 38: mod_base = OTHER; note = 2'-O-methyl modified nucleotide
  modified_base 39: mod_base = OTHER; note = 2'-O-methyl modified nucleotide
  modified_base 40: mod_base = OTHER; note = 2'-O-methyl modified nucleotide
  modified_base 69: mod_base = OTHER; note = 2'-O-methyl modified nucleotide
  modified_base 70: mod_base = OTHER; note = 2'-O-methyl modified nucleotide
  modified_base 71: mod_base = OTHER; note = 2'-O-methyl modified nucleotide
  modified_base 72: mod_base = OTHER; note = 2'-O-methyl modified nucleotide
  modified_base 73: mod_base = OTHER; note = 2'-O-methyl modified nucleotide
  modified_base 74: mod_base = OTHER; note = 2'-O-methyl modified nucleotide
  modified_base 75: mod_base = OTHER; note = 2'-O-methyl modified nucleotide
  modified_base 76: mod_base = OTHER; note = 2'-O-methyl modified nucleotide
  modified_base 77: mod_base = OTHER; note = 2'-O-methyl modified nucleotide
  modified_base 78: mod_base = OTHER; note = 2'-O-methyl modified nucleotide
  modified_base 79: mod_base = OTHER; note = 2'-O-methyl modified nucleotide
  modified_base 80: mod_base = OTHER; note = 2'-O-methyl modified nucleotide
  modified_base 81: mod_base = OTHER; note = 2'-O-methyl modified nucleotide
  modified_base 82: mod_base = OTHER; note = 2'-O-methyl modified nucleotide
  modified_base 83: mod_base = OTHER; note = 2'-O-methyl modified nucleotide
  modified_base 84: mod_base = OTHER; note = 2'-O-methyl modified nucleotide
  modified_base 85: mod_base = OTHER; note = 2'-O-methyl modified nucleotide
  modified_base 86: mod_base = OTHER; note = 2'-O-methyl modified nucleotide
  modified_base 87: mod_base = OTHER; note = 2'-O-methyl modified nucleotide
  modified_base 88: mod_base = OTHER; note = 2'-O-methyl modified nucleotide
  modified_base 89: mod_base = OTHER; note = 2'-O-methyl modified nucleotide
  modified_base 90: mod_base = OTHER; note = 2'-O-methyl modified nucleotide
  modified_base 91: mod_base = OTHER; note = 2'-O-methyl modified nucleotide
  modified_base 92: mod_base = OTHER; note = 2'-O-methyl modified nucleotide
  modified_base 93: mod_base = OTHER; note = 2'-O-methyl modified nucleotide
  modified_base 94: mod_base = OTHER; note = 2'-O-methyl modified nucleotide
  modified_base 95: mod_base = OTHER; note = 2'-O-methyl modified nucleotide
  modified_base 96: mod_base = OTHER; note = 2'-O-methyl modified nucleotide
  modified_base 126: mod_base = OTHER; note = Nucleotide with phosphorothioate linkage
  modified_base 127: mod_base = OTHER; note = 2'-O-methyl modified nucleotide with phosphorothioate linkage
  modified_base 128: mod_base = OTHER; note = 2'-O-methyl modified nucleotide with phosphorothioate linkage
  modified_base 129: mod_base = OTHER; note = 2'-O-methyl modified nucleotide
gagaatcaaaatcggtgaatgttttagagctagaaatagcaagttaaaataaggctagtccgttatcaacttgaaaaagtggcaccgagtcggtgcgtctgtctgcctatttaacccaccgattttgat

SEQ ID NO: 16410 - RNA, 128 nt, synthetic construct
  source 1..128: mol_type = other RNA
  modified_base 1: mod_base = OTHER; note = 2'-O-methyl modified nucleotide with phosphorothioate linkage
  modified_base 2: mod_base = OTHER; note = 2'-O-methyl modified nucleotide with phosphorothioate linkage
  modified_base 3: mod_base = OTHER; note = 2'-O-methyl modified nucleotide with phosphorothioate linkage
  modified_base 29: mod_base = OTHER; note = 2'-O-methyl modified nucleotide
  modified_base 30: mod_base = OTHER; note = 2'-O-methyl modified nucleotide
  modified_base 31: mod_base = OTHER; note = 2'-O-methyl modified nucleotide
  modified_base 32: mod_base = OTHER; note = 2'-O-methyl modified nucleotide
  modified_base 33: mod_base = OTHER; note = 2'-O-methyl modified nucleotide
  modified_base 34: mod_base = OTHER; note = 2'-O-methyl modified nucleotide
  modified_base 35: mod_base = OTHER; note = 2'-O-methyl modified nucleotide
  modified_base 36: mod_base = OTHER; note = 2'-O-methyl modified nucleotide
  modified_base 37: mod_base = OTHER; note = 2'-O-methyl modified nucleotide
  modified_base 38: mod_base = OTHER; note = 2'-O-methyl modified nucleotide
  modified_base 39: mod_base = OTHER; note = 2'-O-methyl modified nucleotide
  modified_base 40: mod_base = OTHER; note = 2'-O-methyl modified nucleotide
  modified_base 69: mod_base = OTHER; note = 2'-O-methyl modified nucleotide
  modified_base 70: mod_base = OTHER; note = 2'-O-methyl modified nucleotide
  modified_base 71: mod_base = OTHER; note = 2'-O-methyl modified nucleotide
  modified_base 72: mod_base = OTHER; note = 2'-O-methyl modified nucleotide
  modified_base 73: mod_base = OTHER; note = 2'-O-methyl modified nucleotide
  modified_base 74: mod_base = OTHER; note = 2'-O-methyl modified nucleotide
  modified_base 75: mod_base = OTHER; note = 2'-O-methyl modified nucleotide
  modified_base 76: mod_base = OTHER; note = 2'-O-methyl modified nucleotide
  modified_base 77: mod_base = OTHER; note = 2'-O-methyl modified nucleotide
  modified_base 78: mod_base = OTHER; note = 2'-O-methyl modified nucleotide
  modified_base 79: mod_base = OTHER; note = 2'-O-methyl modified nucleotide
  modified_base 80: mod_base = OTHER; note = 2'-O-methyl modified nucleotide
  modified_base 81: mod_base = OTHER; note = 2'-O-methyl modified nucleotide
  modified_base 82: mod_base = OTHER; note = 2'-O-methyl modified nucleotide
  modified_base 83: mod_base = OTHER; note = 2'-O-methyl modified nucleotide
  modified_base 84: mod_base = OTHER; note = 2'-O-methyl modified nucleotide
  modified_base 85: mod_base = OTHER; note = 2'-O-methyl modified nucleotide
  modified_base 86: mod_base = OTHER; note = 2'-O-methyl modified nucleotide
  modified_base 87: mod_base = OTHER; note = 2'-O-methyl modified nucleotide
  modified_base 88: mod_base = OTHER; note = 2'-O-methyl modified nucleotide
  modified_base 89: mod_base = OTHER; note = 2'-O-methyl modified nucleotide
  modified_base 90: mod_base = OTHER; note = 2'-O-methyl modified nucleotide
  modified_base 91: mod_base = OTHER; note = 2'-O-methyl modified nucleotide
  modified_base 92: mod_base = OTHER; note = 2'-O-methyl modified nucleotide
  modified_base 93: mod_base = OTHER; note = 2'-O-methyl modified nucleotide
  modified_base 94: mod_base = OTHER; note = 2'-O-methyl modified nucleotide
  modified_base 95: mod_base = OTHER; note = 2'-O-methyl modified nucleotide
  modified_base 96: mod_base = OTHER; note = 2'-O-methyl modified nucleotide
  modified_base 125: mod_base = OTHER; note = Nucleotide with phosphorothioate linkage
  modified_base 126: mod_base = OTHER; note = 2'-O-methyl modified nucleotide with phosphorothioate linkage
  modified_base 127: mod_base = OTHER; note = 2'-O-methyl modified nucleotide with phosphorothioate linkage
  modified_base 128: mod_base = OTHER; note = 2'-O-methyl modified nucleotide
gagaatcaaaatcggtgaatgttttagagctagaaatagcaagttaaaataaggctagtccgttatcaacttgaaaaagtggcaccgagtcggtgcgtctgtctgcctatttaacccaccgattttga

SEQ ID NO: 16411 - RNA, 127 nt, synthetic construct
  source 1..127: mol_type = other RNA
  modified_base 1: mod_base = OTHER; note = 2'-O-methyl modified nucleotide with phosphorothioate linkage
  modified_base 2: mod_base = OTHER; note = 2'-O-methyl modified nucleotide with phosphorothioate linkage
  modified_base 3: mod_base = OTHER; note = 2'-O-methyl modified nucleotide with phosphorothioate linkage
  modified_base 29: mod_base = OTHER; note = 2'-O-methyl modified nucleotide
  modified_base 30: mod_base = OTHER; note = 2'-O-methyl modified nucleotide
  modified_base 31: mod_base = OTHER; note = 2'-O-methyl modified nucleotide
  modified_base 32: mod_base = OTHER; note = 2'-O-methyl modified nucleotide
  modified_base 33: mod_base = OTHER; note = 2'-O-methyl modified nucleotide
  modified_base 34: mod_base = OTHER; note = 2'-O-methyl modified nucleotide
  modified_base 35: mod_base = OTHER; note = 2'-O-methyl modified nucleotide
  modified_base 36: mod_base = OTHER; note = 2'-O-methyl modified nucleotide
  modified_base 37: mod_base = OTHER; note = 2'-O-methyl modified nucleotide
  modified_base 38: mod_base = OTHER; note = 2'-O-methyl modified nucleotide
  modified_base 39: mod_base = OTHER; note = 2'-O-methyl modified nucleotide
  modified_base 40: mod_base = OTHER; note = 2'-O-methyl modified nucleotide
  modified_base 69: mod_base = OTHER; note = 2'-O-methyl modified nucleotide
  modified_base 70: mod_base = OTHER; note = 2'-O-methyl modified nucleotide
  modified_base 71: mod_base = OTHER; note = 2'-O-methyl modified nucleotide
  modified_base 72: mod_base = OTHER; note = 2'-O-methyl modified nucleotide
  modified_base 73: mod_base = OTHER; note = 2'-O-methyl modified nucleotide
  modified_base 74: mod_base = OTHER; note = 2'-O-methyl modified nucleotide
  modified_base 75: mod_base = OTHER; note = 2'-O-methyl modified nucleotide
  modified_base 76: mod_base = OTHER; note = 2'-O-methyl modified nucleotide
  modified_base 77: mod_base = OTHER; note = 2'-O-methyl modified nucleotide
  modified_base 78: mod_base = OTHER; note = 2'-O-methyl modified nucleotide
  modified_base 79: mod_base = OTHER; note = 2'-O-methyl modified nucleotide
  modified_base 80: mod_base = OTHER; note = 2'-O-methyl modified nucleotide
  modified_base 81: mod_base = OTHER; note = 2'-O-methyl modified nucleotide
  modified_base 82: mod_base = OTHER; note = 2'-O-methyl modified nucleotide
  modified_base 83: mod_base = OTHER; note = 2'-O-methyl modified nucleotide
  modified_base 84: mod_base = OTHER; note = 2'-O-methyl modified nucleotide
  modified_base 85: mod_base = OTHER; note = 2'-O-methyl modified nucleotide
  modified_base 86: mod_base = OTHER; note = 2'-O-methyl modified nucleotide
  modified_base 87: mod_base = OTHER; note = 2'-O-methyl modified nucleotide
  modified_base 88: mod_base = OTHER; note = 2'-O-methyl modified nucleotide
  modified_base 89: mod_base = OTHER; note = 2'-O-methyl modified nucleotide
  modified_base 90: mod_base = OTHER; note = 2'-O-methyl modified nucleotide
  modified_base 91: mod_base = OTHER; note = 2'-O-methyl modified nucleotide
  modified_base 92: mod_base = OTHER; note = 2'-O-methyl modified nucleotide
  modified_base 93: mod_base = OTHER; note = 2'-O-methyl modified nucleotide
  modified_base 94: mod_base = OTHER; note = 2'-O-methyl modified nucleotide
  modified_base 95: mod_base = OTHER; note = 2'-O-methyl modified nucleotide
  modified_base 96: mod_base = OTHER; note = 2'-O-methyl modified nucleotide
  modified_base 124: mod_base = OTHER; note = Nucleotide with phosphorothioate linkage
  modified_base 125: mod_base = OTHER; note = 2'-O-methyl modified nucleotide with phosphorothioate linkage
  modified_base 126: mod_base = OTHER; note = 2'-O-methyl modified nucleotide with phosphorothioate linkage
  modified_base 127: mod_base = OTHER; note = 2'-O-methyl modified nucleotide
gagaatcaaaatcggtgaatgttttagagctagaaatagcaagttaaaataaggctagtccgttatcaacttgaaaaagtggcaccgagtcggtgcgtctgtctgcctatttaacccaccgattttg

SEQ ID NO: 16412 - RNA, 126 nt, synthetic construct
  source 1..126: mol_type = other RNA
  modified_base 1: mod_base = OTHER; note = 2'-O-methyl modified nucleotide with phosphorothioate linkage
  modified_base 2: mod_base = OTHER; note = 2'-O-methyl modified nucleotide with phosphorothioate linkage
  modified_base 3: mod_base = OTHER; note = 2'-O-methyl modified nucleotide with phosphorothioate linkage
  modified_base 29: mod_base = OTHER; note = 2'-O-methyl modified nucleotide
  modified_base 30: mod_base = OTHER; note = 2'-O-methyl modified nucleotide
  modified_base 31: mod_base = OTHER; note = 2'-O-methyl modified nucleotide
  modified_base 32: mod_base = OTHER; note = 2'-O-methyl modified nucleotide
  modified_base 33: mod_base = OTHER; note = 2'-O-methyl modified nucleotide
  modified_base 34: mod_base = OTHER; note = 2'-O-methyl modified nucleotide
  modified_base 35: mod_base = OTHER; note = 2'-O-methyl modified nucleotide
  modified_base 36: mod_base = OTHER; note = 2'-O-methyl modified nucleotide
  modified_base 37: mod_base = OTHER; note = 2'-O-methyl modified nucleotide
  modified_base 38: mod_base = OTHER; note = 2'-O-methyl modified nucleotide
  modified_base 39: mod_base = OTHER; note = 2'-O-methyl modified nucleotide
  modified_base 40: mod_base = OTHER; note = 2'-O-methyl modified nucleotide
  modified_base 69: mod_base = OTHER; note = 2'-O-methyl modified nucleotide
  modified_base 70: mod_base = OTHER; note = 2'-O-methyl modified nucleotide
  modified_base 71: mod_base = OTHER; note = 2'-O-methyl modified nucleotide
  modified_base 72: mod_base = OTHER; note = 2'-O-methyl modified nucleotide
  modified_base 73: mod_base = OTHER; note = 2'-O-methyl modified nucleotide
  modified_base 74: mod_base = OTHER; note = 2'-O-methyl modified nucleotide
  modified_base 75: mod_base = OTHER; note = 2'-O-methyl modified nucleotide
  modified_base 76: mod_base = OTHER; note = 2'-O-methyl modified nucleotide
  modified_base 77: mod_base = OTHER; note = 2'-O-methyl modified nucleotide
  modified_base 78: mod_base = OTHER; note = 2'-O-methyl modified nucleotide
  modified_base 79: mod_base = OTHER; note = 2'-O-methyl modified nucleotide
  modified_base 80: mod_base = OTHER; note = 2'-O-methyl modified nucleotide
  modified_base 81: mod_base = OTHER; note = 2'-O-methyl modified nucleotide
  modified_base 82: mod_base = OTHER; note = 2'-O-methyl modified nucleotide
  modified_base 83: mod_base = OTHER; note = 2'-O-methyl modified nucleotide
  modified_base 84: mod_base = OTHER; note = 2'-O-methyl modified nucleotide
  modified_base 85: mod_base = OTHER; note = 2'-O-methyl modified nucleotide
  modified_base 86: mod_base = OTHER; note = 2'-O-methyl modified nucleotide
  modified_base 87: mod_base = OTHER; note = 2'-O-methyl modified nucleotide
  modified_base 88: mod_base = OTHER; note = 2'-O-methyl modified nucleotide
  modified_base 89: mod_base = OTHER; note = 2'-O-methyl modified nucleotide
  modified_base 90: mod_base = OTHER; note = 2'-O-methyl modified nucleotide
  modified_base 91: mod_base = OTHER; note = 2'-O-methyl modified nucleotide
  modified_base 92: mod_base = OTHER; note = 2'-O-methyl modified nucleotide
  modified_base 93: mod_base = OTHER; note = 2'-O-methyl modified nucleotide
  modified_base 94: mod_base = OTHER; note = 2'-O-methyl modified nucleotide
  modified_base 95: mod_base = OTHER; note = 2'-O-methyl modified nucleotide
  modified_base 96: mod_base = OTHER; note = 2'-O-methyl modified nucleotide
  modified_base 123: mod_base = OTHER; note = Nucleotide with phosphorothioate linkage
  modified_base 124: mod_base = OTHER; note = 2'-O-methyl modified nucleotide with phosphorothioate linkage
  modified_base 125: mod_base = OTHER; note = 2'-O-methyl modified nucleotide with phosphorothioate linkage
  modified_base 126: mod_base = OTHER; note = 2'-O-methyl modified nucleotide
gagaatcaaaatcggtgaatgttttagagctagaaatagcaagttaaaataaggctagtccgttatcaacttgaaaaagtggcaccgagtcggtgcgtctgtctgcctatttaacccaccgatttt

SEQ ID NO: 16413 - RNA, 125 nt, synthetic construct
  source 1..125: mol_type = other RNA
  modified_base 1: mod_base = OTHER; note = 2'-O-methyl modified nucleotide with phosphorothioate linkage
  modified_base 2: mod_base = OTHER; note = 2'-O-methyl modified nucleotide with phosphorothioate linkage
  modified_base 3: mod_base = OTHER; note = 2'-O-methyl modified nucleotide with phosphorothioate linkage
  modified_base 29: mod_base = OTHER; note = 2'-O-methyl modified nucleotide
  modified_base 30: mod_base = OTHER; note = 2'-O-methyl modified nucleotide
  modified_base 31: mod_base = OTHER; note = 2'-O-methyl modified nucleotide
  modified_base 32: mod_base = OTHER; note = 2'-O-methyl modified nucleotide
  modified_base 33: mod_base = OTHER; note = 2'-O-methyl modified nucleotide
  modified_base 34: mod_base = OTHER; note = 2'-O-methyl modified nucleotide
  modified_base 35: mod_base = OTHER; note = 2'-O-methyl modified nucleotide
  modified_base 36: mod_base = OTHER; note = 2'-O-methyl modified nucleotide
  modified_base 37: mod_base = OTHER; note = 2'-O-methyl modified nucleotide
  modified_base 38: mod_base = OTHER; note = 2'-O-methyl modified nucleotide
  modified_base 39: mod_base = OTHER; note = 2'-O-methyl modified nucleotide
  modified_base 40: mod_base = OTHER; note = 2'-O-methyl modified nucleotide
  modified_base 69: mod_base = OTHER; note = 2'-O-methyl modified nucleotide
  modified_base 70: mod_base = OTHER; note = 2'-O-methyl modified nucleotide
  modified_base 71: mod_base = OTHER; note = 2'-O-methyl modified nucleotide
  modified_base 72: mod_base = OTHER; note = 2'-O-methyl modified nucleotide
  modified_base 73: mod_base = OTHER; note = 2'-O-methyl modified nucleotide
  modified_base 74: mod_base = OTHER; note = 2'-O-methyl modified nucleotide
  modified_base 75: mod_base = OTHER; note = 2'-O-methyl modified nucleotide
  modified_base 76: mod_base = OTHER; note = 2'-O-methyl modified nucleotide
  modified_base 77: mod_base = OTHER; note = 2'-O-methyl modified nucleotide
  modified_base 78: mod_base = OTHER; note = 2'-O-methyl modified nucleotide
  modified_base 79: mod_base = OTHER; note = 2'-O-methyl modified nucleotide
  modified_base 80: mod_base = OTHER; note = 2'-O-methyl modified nucleotide
  modified_base 81: mod_base = OTHER; note = 2'-O-methyl modified nucleotide
  modified_base 82: mod_base = OTHER; note = 2'-O-methyl modified nucleotide
  modified_base 83: mod_base = OTHER; note = 2'-O-methyl modified nucleotide
  modified_base 84: mod_base = OTHER; note = 2'-O-methyl modified nucleotide
  modified_base 85: mod_base = OTHER; note = 2'-O-methyl modified nucleotide
  modified_base 86: mod_base = OTHER; note = 2'-O-methyl modified nucleotide
  modified_base 87: mod_base = OTHER; note = 2'-O-methyl modified nucleotide
  modified_base 88: mod_base = OTHER; note = 2'-O-methyl modified nucleotide
  modified_base 89: mod_base = OTHER; note = 2'-O-methyl modified nucleotide
  modified_base 90: mod_base = OTHER; note = 2'-O-methyl modified nucleotide
  modified_base 91: mod_base = OTHER; note = 2'-O-methyl modified nucleotide
  modified_base 92: mod_base = OTHER; note = 2'-O-methyl modified nucleotide
  modified_base 93: mod_base = OTHER; note = 2'-O-methyl modified nucleotide
  modified_base 94: mod_base = OTHER; note = 2'-O-methyl modified nucleotide
  modified_base 95: mod_base = OTHER; note = 2'-O-methyl modified nucleotide
  modified_base 96: mod_base = OTHER; note = 2'-O-methyl modified nucleotide
  modified_base 122: mod_base = OTHER; note = Nucleotide with phosphorothioate linkage
  modified_base 123: mod_base = OTHER; note = 2'-O-methyl modified nucleotide with phosphorothioate linkage
  modified_base 124: mod_base = OTHER; note = 2'-O-methyl modified nucleotide with phosphorothioate linkage
  modified_base 125: mod_base = OTHER; note = 2'-O-methyl modified nucleotide
gagaatcaaaatcggtgaatgttttagagctagaaatagcaagttaaaataaggctagtccgttatcaacttgaaaaagtggcaccgagtcggtgcgtctgtctgcctatttaacccaccgattt

SEQ ID NO: 16414 - RNA, 124 nt, synthetic construct
  source 1..124: mol_type = other RNA
  modified_base 1: mod_base = OTHER; note = 2'-O-methyl modified nucleotide with phosphorothioate linkage
  modified_base 2: mod_base = OTHER; note = 2'-O-methyl modified nucleotide with phosphorothioate linkage
  modified_base 3: mod_base = OTHER; note = 2'-O-methyl modified nucleotide with phosphorothioate linkage
  modified_base 29: mod_base = OTHER; note = 2'-O-methyl modified nucleotide
  modified_base 30: mod_base = OTHER; note = 2'-O-methyl modified nucleotide
  modified_base 31: mod_base = OTHER; note = 2'-O-methyl modified nucleotide
  modified_base 32: mod_base = OTHER; note = 2'-O-methyl modified nucleotide
  modified_base 33: mod_base = OTHER; note = 2'-O-methyl modified nucleotide
  modified_base 34: mod_base = OTHER; note = 2'-O-methyl modified nucleotide
  modified_base 35: mod_base = OTHER; note = 2'-O-methyl modified nucleotide
  modified_base 36: mod_base = OTHER; note = 2'-O-methyl modified nucleotide
  modified_base 37: mod_base = OTHER; note = 2'-O-methyl modified nucleotide
  modified_base 38: mod_base = OTHER; note = 2'-O-methyl modified nucleotide
  modified_base 39: mod_base = OTHER; note = 2'-O-methyl modified nucleotide
  modified_base 40: mod_base = OTHER; note = 2'-O-methyl modified nucleotide
  modified_base 69: mod_base = OTHER; note = 2'-O-methyl modified nucleotide
  modified_base 70: mod_base = OTHER; note = 2'-O-methyl modified nucleotide
  modified_base 71: mod_base = OTHER; note = 2'-O-methyl modified nucleotide
  modified_base 72: mod_base = OTHER; note = 2'-O-methyl modified nucleotide
  modified_base 73: mod_base = OTHER; note = 2'-O-methyl modified nucleotide
  modified_base 74: mod_base = OTHER; note = 2'-O-methyl modified nucleotide
  modified_base 75: mod_base = OTHER; note = 2'-O-methyl modified nucleotide
  modified_base 76: mod_base = OTHER; note = 2'-O-methyl modified nucleotide
  modified_base 77: mod_base = OTHER; note = 2'-O-methyl modified nucleotide
  modified_base 78: mod_base = OTHER; note = 2'-O-methyl modified nucleotide
  modified_base 79: mod_base = OTHER; note = 2'-O-methyl modified nucleotide
  modified_base 80: mod_base = OTHER; note = 2'-O-methyl modified nucleotide
  modified_base 81: mod_base = OTHER; note = 2'-O-methyl modified nucleotide
  modified_base 82: mod_base = OTHER; note = 2'-O-methyl modified nucleotide
  modified_base 83: mod_base = OTHER; note = 2'-O-methyl modified nucleotide
  modified_base 84: mod_base = OTHER; note = 2'-O-methyl modified nucleotide
  modified_base 85: mod_base = OTHER; note = 2'-O-methyl modified nucleotide
  modified_base 86: mod_base = OTHER; note = 2'-O-methyl modified nucleotide
  modified_base 87: mod_base = OTHER; note = 2'-O-methyl modified nucleotide
  modified_base 88: mod_base = OTHER; note = 2'-O-methyl modified nucleotide
  modified_base 89: mod_base = OTHER; note = 2'-O-methyl modified nucleotide
  modified_base 90: mod_base = OTHER; note = 2'-O-methyl modified nucleotide
  modified_base 91: mod_base = OTHER; note = 2'-O-methyl modified nucleotide
  modified_base 92: mod_base = OTHER; note = 2'-O-methyl modified nucleotide
  modified_base 93: mod_base = OTHER; note = 2'-O-methyl modified nucleotide
  modified_base 94: mod_base = OTHER; note = 2'-O-methyl modified nucleotide
  modified_base 95: mod_base = OTHER; note = 2'-O-methyl modified nucleotide
  modified_base 96: mod_base = OTHER; note = 2'-O-methyl modified nucleotide
  modified_base 121: mod_base = OTHER; note = Nucleotide with phosphorothioate linkage
  modified_base 122: mod_base = OTHER; note = 2'-O-methyl modified nucleotide with phosphorothioate linkage
  modified_base 123: mod_base = OTHER; note = 2'-O-methyl modified nucleotide with phosphorothioate linkage
  modified_base 124: mod_base = OTHER; note = 2'-O-methyl modified nucleotide
gagaatcaaaatcggtgaatgttttagagctagaaatagcaagttaaaataaggctagtccgttatcaacttgaaaaagtggcaccgagtcggtgcgtctgtctgcctatttaacccaccgatt

SEQ ID NO: 16415 - RNA, 131 nt, synthetic construct
  source 1..131: mol_type = other RNA
  modified_base 1: mod_base = OTHER; note = 2'-O-methyl modified nucleotide with phosphorothioate linkage
  modified_base 2: mod_base = OTHER; note = 2'-O-methyl modified nucleotide with phosphorothioate linkage
  modified_base 3: mod_base = OTHER; note = 2'-O-methyl modified nucleotide with phosphorothioate linkage
  modified_base 29: mod_base = OTHER; note = 2'-O-methyl modified nucleotide
  modified_base 30: mod_base = OTHER; note = 2'-O-methyl modified nucleotide
  modified_base 31: mod_base = OTHER; note = 2'-O-methyl modified nucleotide
  modified_base 32: mod_base = OTHER; note = 2'-O-methyl modified nucleotide
  modified_base 33: mod_base = OTHER; note = 2'-O-methyl modified nucleotide
  modified_base 34: mod_base = OTHER; note = 2'-O-methyl modified nucleotide
  modified_base 35: mod_base = OTHER; note = 2'-O-methyl modified nucleotide
  modified_base 36: mod_base = OTHER; note = 2'-O-methyl modified nucleotide
  modified_base 37: mod_base = OTHER; note = 2'-O-methyl modified nucleotide
  modified_base 38: mod_base = OTHER; note = 2'-O-methyl modified nucleotide
  modified_base 39: mod_base = OTHER; note = 2'-O-methyl modified nucleotide
  modified_base 40: mod_base = OTHER; note = 2'-O-methyl modified nucleotide
  modified_base 69: mod_base = OTHER; note = 2'-O-methyl modified nucleotide
  modified_base 70: mod_base = OTHER; note = 2'-O-methyl modified nucleotide
  modified_base 71: mod_base = OTHER; note = 2'-O-methyl modified nucleotide
  modified_base 72: mod_base = OTHER; note = 2'-O-methyl modified nucleotide
  modified_base 73: mod_base = OTHER; note = 2'-O-methyl modified nucleotide
  modified_base 74: mod_base = OTHER; note = 2'-O-methyl modified nucleotide
  modified_base 75: mod_base = OTHER; note = 2'-O-methyl modified nucleotide
  modified_base 76: mod_base = OTHER; note = 2'-O-methyl modified nucleotide
  modified_base 77: mod_base = OTHER; note = 2'-O-methyl modified nucleotide
  modified_base 78: mod_base = OTHER; note = 2'-O-methyl modified nucleotide
  modified_base 79: mod_base = OTHER; note = 2'-O-methyl modified nucleotide
  modified_base 80: mod_base = OTHER; note = 2'-O-methyl modified nucleotide
  modified_base 81: mod_base = OTHER; note = 2'-O-methyl modified nucleotide
  modified_base 82: mod_base = OTHER; note = 2'-O-methyl modified nucleotide
  modified_base 83: mod_base = OTHER; note = 2'-O-methyl modified nucleotide
  modified_base 84: mod_base = OTHER; note = 2'-O-methyl modified nucleotide
  modified_base 85: mod_base = OTHER; note = 2'-O-methyl modified nucleotide
  modified_base 86: mod_base = OTHER; note = 2'-O-methyl modified nucleotide
  modified_base 87: mod_base = OTHER; note = 2'-O-methyl modified nucleotide
  modified_base 88: mod_base = OTHER; note = 2'-O-methyl modified nucleotide
  modified_base 89: mod_base = OTHER; note = 2'-O-methyl modified nucleotide
  modified_base 90: mod_base = OTHER; note = 2'-O-methyl modified nucleotide
  modified_base 91: mod_base = OTHER; note = 2'-O-methyl modified nucleotide
  modified_base 92: mod_base = OTHER; note = 2'-O-methyl modified nucleotide
  modified_base 93: mod_base = OTHER; note = 2'-O-methyl modified nucleotide
  modified_base 94: mod_base = OTHER; note = 2'-O-methyl modified nucleotide
  modified_base 95: mod_base = OTHER; note = 2'-O-methyl modified nucleotide
  modified_base 96: mod_base = OTHER; note = 2'-O-methyl modified nucleotide
  modified_base 128: mod_base = OTHER; note = Nucleotide with phosphorothioate linkage
  modified_base 129: mod_base = OTHER; note = 2'-O-methyl modified nucleotide with phosphorothioate linkage
  modified_base 130: mod_base = OTHER; note = 2'-O-methyl modified nucleotide with phosphorothioate linkage
  modified_base 131: mod_base = OTHER; note = 2'-O-methyl modified nucleotide
gagaatcaaaatcggtgaatgttttagagctagaaatagcaagttaaaataaggctagtccgttatcaacttgaaaaagtggcaccgagtcggtgcaagtctgtctgcctatttaacccaccgattttgat

SEQ ID NO: 16416 - RNA, 130 nt, synthetic construct
  source 1..130: mol_type = other RNA
  modified_base 1: mod_base = OTHER; note = 2'-O-methyl modified nucleotide with phosphorothioate linkage
  modified_base 2: mod_base = OTHER; note = 2'-O-methyl modified nucleotide with phosphorothioate linkage
  modified_base 3: mod_base = OTHER; note = 2'-O-methyl modified nucleotide with phosphorothioate linkage
  modified_base 29: mod_base = OTHER; note = 2'-O-methyl modified nucleotide
  modified_base 30: mod_base = OTHER; note = 2'-O-methyl modified nucleotide
  modified_base 31: mod_base = OTHER; note = 2'-O-methyl modified nucleotide
  modified_base 32: mod_base = OTHER; note = 2'-O-methyl modified nucleotide
  modified_base 33: mod_base = OTHER; note = 2'-O-methyl modified nucleotide
  modified_base 34: mod_base = OTHER; note = 2'-O-methyl modified nucleotide
  modified_base 35: mod_base = OTHER; note = 2'-O-methyl modified nucleotide
  modified_base 36: mod_base = OTHER; note = 2'-O-methyl modified nucleotide
  modified_base 37: mod_base = OTHER; note = 2'-O-methyl modified nucleotide
  modified_base 38: mod_base = OTHER; note = 2'-O-methyl modified nucleotide
  modified_base 39: mod_base = OTHER; note = 2'-O-methyl modified nucleotide
  modified_base 40: mod_base = OTHER; note = 2'-O-methyl modified nucleotide
  modified_base 69: mod_base = OTHER; note = 2'-O-methyl modified nucleotide
  modified_base 70: mod_base = OTHER; note = 2'-O-methyl modified nucleotide
  modified_base 71: mod_base = OTHER; note = 2'-O-methyl modified nucleotide
  modified_base 72: mod_base = OTHER; note = 2'-O-methyl modified nucleotide
  modified_base 73: mod_base = OTHER; note = 2'-O-methyl modified nucleotide
  modified_base 74: mod_base = OTHER; note = 2'-O-methyl modified nucleotide
  modified_base 75: mod_base = OTHER; note = 2'-O-methyl modified nucleotide
  modified_base 76: mod_base = OTHER; note = 2'-O-methyl modified nucleotide
  modified_base 77: mod_base = OTHER; note = 2'-O-methyl modified nucleotide
  modified_base 78: mod_base = OTHER; note = 2'-O-methyl modified nucleotide
  modified_base 79: mod_base = OTHER; note = 2'-O-methyl modified nucleotide
  modified_base 80: mod_base = OTHER; note = 2'-O-methyl modified nucleotide
  modified_base 81: mod_base = OTHER; note = 2'-O-methyl modified nucleotide
  modified_base 82: mod_base = OTHER; note = 2'-O-methyl modified nucleotide
  modified_base 83: mod_base = OTHER; note = 2'-O-methyl modified nucleotide
  modified_base 84: mod_base = OTHER; note = 2'-O-methyl modified nucleotide
  modified_base 85: mod_base = OTHER; note = 2'-O-methyl modified nucleotide
  modified_base 86: mod_base = OTHER; note = 2'-O-methyl modified nucleotide
  modified_base 87: mod_base = OTHER; note = 2'-O-methyl modified nucleotide
  modified_base 88: mod_base = OTHER; note = 2'-O-methyl modified nucleotide
  modified_base 89: mod_base = OTHER; note = 2'-O-methyl modified nucleotide
  modified_base 90: mod_base = OTHER; note = 2'-O-methyl modified nucleotide
  modified_base 91: mod_base = OTHER; note = 2'-O-methyl modified nucleotide
  modified_base 92: mod_base = OTHER; note = 2'-O-methyl modified nucleotide
  modified_base 93: mod_base = OTHER; note = 2'-O-methyl modified nucleotide
  modified_base 94: mod_base = OTHER; note = 2'-O-methyl modified nucleotide
  modified_base 95: mod_base = OTHER; note = 2'-O-methyl modified nucleotide
  modified_base 96: mod_base = OTHER; note = 2'-O-methyl modified nucleotide
  modified_base 127: mod_base = OTHER; note = Nucleotide with phosphorothioate linkage
  modified_base 128: mod_base = OTHER; note = 2'-O-methyl modified nucleotide with phosphorothioate linkage
  modified_base 129: mod_base = OTHER; note = 2'-O-methyl modified nucleotide with phosphorothioate linkage
  modified_base 130: mod_base = OTHER; note = 2'-O-methyl modified nucleotide
gagaatcaaaatcggtgaatgttttagagctagaaatagcaagttaaaataaggctagtccgttatcaacttgaaaaagtggcaccgagtcggtgcaagtctgtctgcctatttaacccaccgattttga

SEQ ID NO: 16417 - RNA, 129 nt, synthetic construct
  source 1..129: mol_type = other RNA
  modified_base 1: mod_base = OTHER; note = 2'-O-methyl modified nucleotide with phosphorothioate linkage
  modified_base 2: mod_base = OTHER; note = 2'-O-methyl modified nucleotide with phosphorothioate linkage
  modified_base 3: mod_base = OTHER; note = 2'-O-methyl modified nucleotide with phosphorothioate linkage
  modified_base 29: mod_base = OTHER; note = 2'-O-methyl modified nucleotide
  modified_base 30: mod_base = OTHER; note = 2'-O-methyl modified nucleotide
  modified_base 31: mod_base = OTHER; note = 2'-O-methyl modified nucleotide
  modified_base 32: mod_base = OTHER; note = 2'-O-methyl modified nucleotide
  modified_base 33: mod_base = OTHER; note = 2'-O-methyl modified nucleotide
  modified_base 34: mod_base = OTHER; note = 2'-O-methyl modified nucleotide
  modified_base 35: mod_base = OTHER; note = 2'-O-methyl modified nucleotide
  modified_base 36: mod_base = OTHER; note = 2'-O-methyl modified nucleotide
  modified_base 37: mod_base = OTHER; note = 2'-O-methyl modified nucleotide
  modified_base 38: mod_base = OTHER; note = 2'-O-methyl modified nucleotide
  modified_base 39: mod_base = OTHER; note = 2'-O-methyl modified nucleotide
  modified_base 40: mod_base = OTHER; note = 2'-O-methyl modified nucleotide
  modified_base 69: mod_base = OTHER; note = 2'-O-methyl modified nucleotide
  modified_base 70: mod_base = OTHER; note = 2'-O-methyl modified nucleotide
  modified_base 71: mod_base = OTHER; note = 2'-O-methyl modified nucleotide
  modified_base 72: mod_base = OTHER; note = 2'-O-methyl modified nucleotide
  modified_base 73: mod_base = OTHER; note = 2'-O-methyl modified nucleotide
  modified_base 74: mod_base = OTHER; note = 2'-O-methyl modified nucleotide
  modified_base 75: mod_base = OTHER; note = 2'-O-methyl modified nucleotide
  modified_base 76: mod_base = OTHER; note = 2'-O-methyl modified nucleotide
  modified_base 77: mod_base = OTHER; note = 2'-O-methyl modified nucleotide
  modified_base 78: mod_base = OTHER; note = 2'-O-methyl modified nucleotide
  modified_base 79: mod_base = OTHER; note = 2'-O-methyl modified nucleotide
  modified_base 80: mod_base = OTHER; note = 2'-O-methyl modified nucleotide
  modified_base 81: mod_base = OTHER; note = 2'-O-methyl modified nucleotide
  modified_base 82: mod_base = OTHER; note = 2'-O-methyl modified nucleotide
  modified_base 83: mod_base = OTHER; note = 2'-O-methyl modified nucleotide
  modified_base 84: mod_base = OTHER; note = 2'-O-methyl modified nucleotide
  modified_base 85: mod_base = OTHER; note = 2'-O-methyl modified nucleotide
  modified_base 86: mod_base = OTHER; note = 2'-O-methyl modified nucleotide
  modified_base 87: mod_base = OTHER; note = 2'-O-methyl modified nucleotide
  modified_base 88: mod_base = OTHER; note = 2'-O-methyl modified nucleotide
  modified_base 89: mod_base = OTHER; note = 2'-O-methyl modified nucleotide
  modified_base 90: mod_base = OTHER; note = 2'-O-methyl modified nucleotide
  modified_base 91: mod_base = OTHER; note = 2'-O-methyl modified nucleotide
  modified_base 92: mod_base = OTHER; note = 2'-O-methyl modified nucleotide
  modified_base 93: mod_base = OTHER; note = 2'-O-methyl modified nucleotide
  modified_base 94: mod_base = OTHER; note = 2'-O-methyl modified nucleotide
  modified_base 95: mod_base = OTHER; note = 2'-O-methyl modified nucleotide
  modified_base 96: mod_base = OTHER; note = 2'-O-methyl modified nucleotide
  modified_base 126: mod_base = OTHER; note = Nucleotide with phosphorothioate linkage
  modified_base 127: mod_base = OTHER; note = 2'-O-methyl modified nucleotide with phosphorothioate linkage
  modified_base 128: mod_base = OTHER; note = 2'-O-methyl modified nucleotide with phosphorothioate linkage
  modified_base 129: mod_base = OTHER; note = 2'-O-methyl modified nucleotide
gagaatcaaaatcggtgaatgttttagagctagaaatagcaagttaaaataaggctagtccgttatcaacttgaaaaagtggcaccgagtcggtgcaagtctgtctgcctatttaacccaccgattttg

SEQ ID NO: 16418 - RNA, 128 nt, synthetic construct
  source 1..128: mol_type = other RNA
  modified_base 1: mod_base = OTHER; note = 2'-O-methyl modified nucleotide with phosphorothioate linkage
  modified_base 2: mod_base = OTHER; note = 2'-O-methyl modified nucleotide with phosphorothioate linkage
  modified_base 3: mod_base = OTHER; note = 2'-O-methyl modified nucleotide with phosphorothioate linkage
  modified_base 29: mod_base = OTHER; note = 2'-O-methyl modified nucleotide
  modified_base 30: mod_base = OTHER; note = 2'-O-methyl modified nucleotide
  modified_base 31: mod_base = OTHER; note = 2'-O-methyl modified nucleotide
  modified_base 32: mod_base = OTHER; note = 2'-O-methyl modified nucleotide
  modified_base 33: mod_base = OTHER; note = 2'-O-methyl modified nucleotide
  modified_base 34: mod_base = OTHER; note = 2'-O-methyl modified nucleotide
  modified_base 35: mod_base = OTHER; note = 2'-O-methyl modified nucleotide
  modified_base 36: mod_base = OTHER; note = 2'-O-methyl modified nucleotide
  modified_base 37: mod_base = OTHER; note = 2'-O-methyl modified nucleotide
  modified_base 38: mod_base = OTHER; note = 2'-O-methyl modified nucleotide
  modified_base 39: mod_base = OTHER; note = 2'-O-methyl modified nucleotide
  modified_base 40: mod_base = OTHER; note = 2'-O-methyl modified nucleotide
  modified_base 69: mod_base = OTHER; note = 2'-O-methyl modified nucleotide
  modified_base 70: mod_base = OTHER; note = 2'-O-methyl modified nucleotide
  modified_base 71: mod_base = OTHER; note = 2'-O-methyl modified nucleotide
  modified_base 72: mod_base = OTHER; note = 2'-O-methyl modified nucleotide
  modified_base 73: mod_base = OTHER; note = 2'-O-methyl modified nucleotide
  modified_base 74: mod_base = OTHER; note = 2'-O-methyl modified nucleotide
  modified_base 75: mod_base = OTHER; note = 2'-O-methyl modified nucleotide
  modified_base 76: mod_base = OTHER; note = 2'-O-methyl modified nucleotide
  modified_base 77: mod_base = OTHER; note = 2'-O-methyl modified nucleotide
  modified_base 78: mod_base = OTHER; note = 2'-O-methyl modified nucleotide
  modified_base 79: mod_base = OTHER; note = 2'-O-methyl modified nucleotide
  modified_base 80: mod_base = OTHER; note = 2'-O-methyl modified nucleotide
  modified_base 81: mod_base = OTHER; note = 2'-O-methyl modified nucleotide
  modified_base 82: mod_base = OTHER; note = 2'-O-methyl modified nucleotide
  modified_base 83: mod_base = OTHER; note = 2'-O-methyl modified nucleotide
  modified_base 84: mod_base = OTHER; note = 2'-O-methyl modified nucleotide
  modified_base 85: mod_base = OTHER; note = 2'-O-methyl modified nucleotide
  modified_base 86: mod_base = OTHER; note = 2'-O-methyl modified nucleotide
  modified_base 87: mod_base = OTHER; note = 2'-O-methyl modified nucleotide
  modified_base 88: mod_base = OTHER; note = 2'-O-methyl modified nucleotide
  modified_base 89: mod_base = OTHER; note = 2'-O-methyl modified nucleotide
  modified_base 90: mod_base = OTHER; note = 2'-O-methyl modified nucleotide
  modified_base 91: mod_base = OTHER; note = 2'-O-methyl modified nucleotide
  modified_base 92: mod_base = OTHER; note = 2'-O-methyl modified nucleotide
  modified_base 93: mod_base = OTHER; note = 2'-O-methyl modified nucleotide
  modified_base 94: mod_base = OTHER; note = 2'-O-methyl modified nucleotide
  modified_base 95: mod_base = OTHER; note = 2'-O-methyl modified nucleotide
  modified_base 96: mod_base = OTHER; note = 2'-O-methyl modified nucleotide
  modified_base 125: mod_base = OTHER; note = Nucleotide with phosphorothioate linkage
  modified_base 126: mod_base = OTHER; note = 2'-O-methyl modified nucleotide with phosphorothioate linkage
  modified_base 127: mod_base = OTHER; note = 2'-O-methyl modified nucleotide with phosphorothioate linkage
  modified_base 128: mod_base = OTHER; note = 2'-O-methyl modified nucleotide
gagaatcaaaatcggtgaatgttttagagctagaaatagcaagttaaaataaggctagtccgttatcaacttgaaaaagtggcaccgagtcggtgcaagtctgtctgcctatttaacccaccgatttt

SEQ ID NO: 16419 - RNA, 127 nt, synthetic construct
  source 1..127: mol_type = other RNA
  modified_base 1: mod_base = OTHER; note = 2'-O-methyl modified nucleotide with phosphorothioate linkage
  modified_base 2: mod_base = OTHER; note = 2'-O-methyl modified nucleotide with phosphorothioate linkage
  modified_base 3: mod_base = OTHER; note = 2'-O-methyl modified nucleotide with phosphorothioate linkage
  modified_base 29: mod_base = OTHER; note = 2'-O-methyl modified nucleotide
  modified_base 30: mod_base = OTHER; note = 2'-O-methyl modified nucleotide
  modified_base 31: mod_base = OTHER; note = 2'-O-methyl modified nucleotide
  modified_base 32: mod_base = OTHER; note = 2'-O-methyl modified nucleotide
  modified_base 33: mod_base = OTHER; note = 2'-O-methyl modified nucleotide
  modified_base 34: mod_base = OTHER; note = 2'-O-methyl modified nucleotide
  modified_base 35: mod_base = OTHER; note = 2'-O-methyl modified nucleotide
  modified_base 36: mod_base = OTHER; note = 2'-O-methyl modified nucleotide
  modified_base 37: mod_base = OTHER; note = 2'-O-methyl modified nucleotide
  modified_base 38: mod_base = OTHER; note = 2'-O-methyl modified nucleotide
  modified_base 39: mod_base = OTHER; note = 2'-O-methyl modified nucleotide
  modified_base 40: mod_base = OTHER; note = 2'-O-methyl modified nucleotide
  modified_base 69: mod_base = OTHER; note = 2'-O-methyl modified nucleotide
  modified_base 70: mod_base = OTHER; note = 2'-O-methyl modified nucleotide
  modified_base 71: mod_base = OTHER; note = 2'-O-methyl modified nucleotide
  modified_base 72: mod_base = OTHER; note = 2'-O-methyl modified nucleotide
  modified_base 73: mod_base = OTHER; note = 2'-O-methyl modified nucleotide
  modified_base 74: mod_base = OTHER; note = 2'-O-methyl modified nucleotide
  modified_base 75: mod_base = OTHER; note = 2'-O-methyl modified nucleotide
  modified_base 76: mod_base = OTHER; note = 2'-O-methyl modified nucleotide
  modified_base 77: mod_base = OTHER; note = 2'-O-methyl modified nucleotide
  modified_base 78: mod_base = OTHER; note = 2'-O-methyl modified nucleotide
  modified_base 79: mod_base = OTHER; note = 2'-O-methyl modified nucleotide
  modified_base 80: mod_base = OTHER; note = 2'-O-methyl modified nucleotide
  modified_base 81: mod_base = OTHER; note = 2'-O-methyl modified nucleotide
  modified_base 82: mod_base = OTHER; note = 2'-O-methyl modified nucleotide
  modified_base 83: mod_base = OTHER; note = 2'-O-methyl modified nucleotide
  modified_base 84: mod_base = OTHER; note = 2'-O-methyl modified nucleotide
  modified_base 85: mod_base = OTHER; note = 2'-O-methyl modified nucleotide
  modified_base 86: mod_base = OTHER; note = 2'-O-methyl modified nucleotide
  modified_base 87: mod_base = OTHER; note = 2'-O-methyl modified nucleotide
  modified_base 88: mod_base = OTHER; note = 2'-O-methyl modified nucleotide
  modified_base 89: mod_base = OTHER; note = 2'-O-methyl modified nucleotide
  modified_base 90: mod_base = OTHER; note = 2'-O-methyl modified nucleotide
  modified_base 91: mod_base = OTHER; note = 2'-O-methyl modified nucleotide
  modified_base 92: mod_base = OTHER; note = 2'-O-methyl modified nucleotide
  modified_base 93: mod_base = OTHER; note = 2'-O-methyl modified nucleotide
  modified_base 94: mod_base = OTHER; note = 2'-O-methyl modified nucleotide
  modified_base 95: mod_base = OTHER; note = 2'-O-methyl modified nucleotide
  modified_base 96: mod_base = OTHER; note = 2'-O-methyl modified nucleotide
  modified_base 124: mod_base = OTHER; note = Nucleotide with phosphorothioate linkage
  modified_base 125: mod_base = OTHER; note = 2'-O-methyl modified nucleotide with phosphorothioate linkage
  modified_base 126: mod_base = OTHER; note = 2'-O-methyl modified nucleotide with phosphorothioate linkage
  modified_base 127: mod_base = OTHER; note = 2'-O-methyl modified nucleotide
gagaatcaaaatcggtgaatgttttagagctagaaatagcaagttaaaataaggctagtccgttatcaacttgaaaaagtggcaccgagtcggtgcaagtctgtctgcctatttaacccaccgattt

SEQ ID NO: 16420 - RNA, 126 nt, synthetic construct
  source 1..126: mol_type = other RNA
  modified_base 1: mod_base = OTHER; note = 2'-O-methyl modified nucleotide with phosphorothioate linkage
  modified_base 2: mod_base = OTHER; note = 2'-O-methyl modified nucleotide with phosphorothioate linkage
  modified_base 3: mod_base = OTHER; note = 2'-O-methyl modified nucleotide with phosphorothioate linkage
  modified_base 29: mod_base = OTHER; note = 2'-O-methyl modified nucleotide
  modified_base 30: mod_base = OTHER; note = 2'-O-methyl modified nucleotide
  modified_base 31: mod_base = OTHER; note = 2'-O-methyl modified nucleotide
  modified_base 32: mod_base = OTHER; note = 2'-O-methyl modified nucleotide
  modified_base 33: mod_base = OTHER; note = 2'-O-methyl modified nucleotide
  modified_base 34: mod_base = OTHER; note = 2'-O-methyl modified nucleotide
  modified_base 35: mod_base = OTHER; note = 2'-O-methyl modified nucleotide
  modified_base 36: mod_base = OTHER; note = 2'-O-methyl modified nucleotide
  modified_base 37: mod_base = OTHER; note = 2'-O-methyl modified nucleotide
  modified_base 38: mod_base = OTHER; note = 2'-O-methyl modified nucleotide
  modified_base 39: mod_base = OTHER; note = 2'-O-methyl modified nucleotide
  modified_base 40: mod_base = OTHER; note = 2'-O-methyl modified nucleotide
  modified_base 69: mod_base = OTHER; note = 2'-O-methyl modified nucleotide
  modified_base 70: mod_base = OTHER; note = 2'-O-methyl modified nucleotide
  modified_base 71: mod_base = OTHER; note = 2'-O-methyl modified nucleotide
  modified_base 72: mod_base = OTHER; note = 2'-O-methyl modified nucleotide
  modified_base 73: mod_base = OTHER; note = 2'-O-methyl modified nucleotide
  modified_base 74: mod_base = OTHER; note = 2'-O-methyl modified nucleotide
  modified_base 75: mod_base = OTHER; note = 2'-O-methyl modified nucleotide
  modified_base 76: mod_base = OTHER; note = 2'-O-methyl modified nucleotide
  modified_base 77: mod_base = OTHER; note = 2'-O-methyl modified nucleotide
  modified_base 78: mod_base = OTHER; note = 2'-O-methyl modified nucleotide
  modified_base 79: mod_base = OTHER; note = 2'-O-methyl modified nucleotide
  modified_base 80: mod_base = OTHER; note = 2'-O-methyl modified nucleotide
  modified_base 81: mod_base = OTHER; note = 2'-O-methyl modified nucleotide
  modified_base 82: mod_base = OTHER; note = 2'-O-methyl modified nucleotide
  modified_base 83: mod_base = OTHER; note = 2'-O-methyl modified nucleotide
  modified_base 84: mod_base = OTHER; note = 2'-O-methyl modified nucleotide
  modified_base 85: mod_base = OTHER; note = 2'-O-methyl modified nucleotide
  modified_base 86: mod_base = OTHER; note = 2'-O-methyl modified nucleotide
  modified_base 87: mod_base = OTHER; note = 2'-O-methyl modified nucleotide
  modified_base 88: mod_base = OTHER; note = 2'-O-methyl modified nucleotide
  modified_base 89: mod_base = OTHER; note = 2'-O-methyl modified nucleotide
  modified_base 90: mod_base = OTHER; note = 2'-O-methyl modified nucleotide
  modified_base 91: mod_base = OTHER; note = 2'-O-methyl modified nucleotide
  modified_base 92: mod_base = OTHER; note = 2'-O-methyl modified nucleotide
  modified_base 93: mod_base = OTHER; note = 2'-O-methyl modified nucleotide
  modified_base 94: mod_base = OTHER; note = 2'-O-methyl modified nucleotide
  modified_base 95: mod_base = OTHER; note = 2'-O-methyl modified nucleotide
  modified_base 96: mod_base = OTHER; note = 2'-O-methyl modified nucleotide
  modified_base 123: mod_base = OTHER; note = Nucleotide with phosphorothioate linkage
  modified_base 124: mod_base = OTHER; note = 2'-O-methyl modified nucleotide with phosphorothioate linkage
  modified_base 125: mod_base = OTHER; note = 2'-O-methyl modified nucleotide with phosphorothioate linkage
  modified_base 126: mod_base = OTHER; note = 2'-O-methyl modified nucleotide
gagaatcaaaatcggtgaatgttttagagctagaaatagcaagttaaaataaggctagtccgttatcaacttgaaaaagtggcaccgagtcggtgcaagtctgtctgcctatttaacccaccgatt

SEQ ID NO: 16421 - RNA, 119 nt, synthetic construct
  source 1..119: mol_type = other RNA
  modified_base 1: mod_base = OTHER; note = 2'-O-methyl modified nucleotide with phosphorothioate linkage
  modified_base 2: mod_base = OTHER; note = 2'-O-methyl modified nucleotide with phosphorothioate linkage
  modified_base 3: mod_base = OTHER; note = 2'-O-methyl modified nucleotide with phosphorothioate linkage
  modified_base 29: mod_base = OTHER; note = 2'-O-methyl modified nucleotide
  modified_base 30: mod_base = OTHER; note = 2'-O-methyl modified nucleotide
  modified_base 31: mod_base = OTHER; note = 2'-O-methyl modified nucleotide
  modified_base 32: mod_base = OTHER; note = 2'-O-methyl modified nucleotide
  modified_base 33: mod_base = OTHER; note = 2'-O-methyl modified nucleotide
  modified_base 34: mod_base = OTHER; note = 2'-O-methyl modified nucleotide
  modified_base 35: mod_base = OTHER; note = 2'-O-methyl modified nucleotide
  modified_base 36: mod_base = OTHER; note = 2'-O-methyl modified nucleotide
  modified_base 37: mod_base = OTHER; note = 2'-O-methyl modified nucleotide
  modified_base 38: mod_base = OTHER; note = 2'-O-methyl modified nucleotide
  modified_base 39: mod_base = OTHER; note = 2'-O-methyl modified nucleotide
  modified_base 40: mod_base = OTHER; note = 2'-O-methyl modified nucleotide
  modified_base 69: mod_base = OTHER; note = 2'-O-methyl modified nucleotide
  modified_base 70: mod_base = OTHER; note = 2'-O-methyl modified nucleotide
  modified_base 71: mod_base = OTHER; note = 2'-O-methyl modified nucleotide
  modified_base 72: mod_base = OTHER; note = 2'-O-methyl modified nucleotide
  modified_base 73: mod_base = OTHER; note = 2'-O-methyl modified nucleotide
  modified_base 74: mod_base = OTHER; note = 2'-O-methyl modified nucleotide
  modified_base 75: mod_base = OTHER; note = 2'-O-methyl modified nucleotide
  modified_base 76: mod_base = OTHER; note = 2'-O-methyl modified nucleotide
  modified_base 77: mod_base = OTHER; note = 2'-O-methyl modified nucleotide
  modified_base 78: mod_base = OTHER; note = 2'-O-methyl modified nucleotide
  modified_base 79: mod_base = OTHER; note = 2'-O-methyl modified nucleotide
  modified_base 80: mod_base = OTHER; note = 2'-O-methyl modified nucleotide
  modified_base 81: mod_base = OTHER; note = 2'-O-methyl modified nucleotide
  modified_base 82: mod_base = OTHER; note = 2'-O-methyl modified nucleotide
  modified_base 83: mod_base = OTHER; note = 2'-O-methyl modified nucleotide
  modified_base 84: mod_base = OTHER; note = 2'-O-methyl modified nucleotide
  modified_base 85: mod_base = OTHER; note = 2'-O-methyl modified nucleotide
  modified_base 86: mod_base = OTHER; note = 2'-O-methyl modified nucleotide
  modified_base 87: mod_base = OTHER; note = 2'-O-methyl modified nucleotide
  modified_base 88: mod_base = OTHER; note = 2'-O-methyl modified nucleotide
  modified_base 89: mod_base = OTHER; note = 2'-O-methyl modified nucleotide
  modified_base 90: mod_base = OTHER; note = 2'-O-methyl modified nucleotide
  modified_base 91: mod_base = OTHER; note = 2'-O-methyl modified nucleotide
  modified_base 92: mod_base = OTHER; note = 2'-O-methyl modified nucleotide
  modified_base 93: mod_base = OTHER; note = 2'-O-methyl modified nucleotide
  modified_base 94: mod_base = OTHER; note = 2'-O-methyl modified nucleotide
  modified_base 95: mod_base = OTHER; note = 2'-O-methyl modified nucleotide
  modified_base 96: mod_base = OTHER; note = 2'-O-methyl modified nucleotide
  modified_base 116: mod_base = OTHER; note = Nucleotide with phosphorothioate linkage
  modified_base 117: mod_base = OTHER; note = 2'-O-methyl modified nucleotide with phosphorothioate linkage
  modified_base 118: mod_base = OTHER; note = 2'-O-methyl modified nucleotide with phosphorothioate linkage
  modified_base 119: mod_base = OTHER; note = 2'-O-methyl modified nucleotide
gctggtacacggcagggtcagttttagagctagaaatagcaagttaaaataaggctagtccgttatcaacttgaaaaagtggcaccgagtcggtgccctgatagtgccctgccgtgtac

SEQ ID NO: 16422 - RNA, 118 nt, synthetic construct
  source 1..118: mol_type = other RNA
  modified_base 1: mod_base = OTHER; note = 2'-O-methyl modified nucleotide with phosphorothioate linkage
  modified_base 2: mod_base = OTHER; note = 2'-O-methyl modified nucleotide with phosphorothioate linkage
  modified_base 3: mod_base = OTHER; note = 2'-O-methyl modified nucleotide with phosphorothioate linkage
  modified_base 29: mod_base = OTHER; note = 2'-O-methyl modified nucleotide
  modified_base 30: mod_base = OTHER; note = 2'-O-methyl modified nucleotide
  modified_base 31: mod_base = OTHER; note = 2'-O-methyl modified nucleotide
  modified_base 32: mod_base = OTHER; note = 2'-O-methyl modified nucleotide
  modified_base 33: mod_base = OTHER; note = 2'-O-methyl modified nucleotide
  modified_base 34: mod_base = OTHER; note = 2'-O-methyl modified nucleotide
  modified_base 35: mod_base = OTHER; note = 2'-O-methyl modified nucleotide
  modified_base 36: mod_base = OTHER; note = 2'-O-methyl modified nucleotide
  modified_base 37: mod_base = OTHER; note = 2'-O-methyl modified nucleotide
  modified_base 38: mod_base = OTHER; note = 2'-O-methyl modified nucleotide
  modified_base 39: mod_base = OTHER; note = 2'-O-methyl modified nucleotide
  modified_base 40: mod_base = OTHER; note = 2'-O-methyl modified nucleotide
  modified_base 69: mod_base = OTHER; note = 2'-O-methyl modified nucleotide
  modified_base 70: mod_base = OTHER; note = 2'-O-methyl modified nucleotide
  modified_base 71: mod_base = OTHER; note = 2'-O-methyl modified nucleotide
  modified_base 72: mod_base = OTHER; note = 2'-O-methyl modified nucleotide
  modified_base 73: mod_base = OTHER; note = 2'-O-methyl modified nucleotide
  modified_base 74: mod_base = OTHER; note = 2'-O-methyl modified nucleotide
  modified_base 75: mod_base = OTHER; note = 2'-O-methyl modified nucleotide
  modified_base 76: mod_base = OTHER; note = 2'-O-methyl modified nucleotide
  modified_base 77: mod_base = OTHER; note = 2'-O-methyl modified nucleotide
  modified_base 78: mod_base = OTHER; note = 2'-O-methyl modified nucleotide
  modified_base 79: mod_base = OTHER; note = 2'-O-methyl modified nucleotide
  modified_base 80: mod_base = OTHER; note = 2'-O-methyl modified nucleotide
  modified_base 81: mod_base = OTHER; note = 2'-O-methyl modified nucleotide
  modified_base 82: mod_base = OTHER; note = 2'-O-methyl modified nucleotide
  modified_base 83: mod_base = OTHER; note = 2'-O-methyl modified nucleotide
  modified_base 84: mod_base = OTHER; note = 2'-O-methyl modified nucleotide
  modified_base 85: mod_base = OTHER; note = 2'-O-methyl modified nucleotide
  modified_base 86: mod_base = OTHER; note = 2'-O-methyl modified nucleotide
  modified_base 87: mod_base = OTHER; note = 2'-O-methyl modified nucleotide
  modified_base 88: mod_base = OTHER; note = 2'-O-methyl modified nucleotide
  modified_base 89: mod_base = OTHER; note = 2'-O-methyl modified nucleotide
  modified_base 90: mod_base = OTHER; note = 2'-O-methyl modified nucleotide
  modified_base 91: mod_base = OTHER; note = 2'-O-methyl modified nucleotide
  modified_base 92: mod_base = OTHER; note = 2'-O-methyl modified nucleotide
  modified_base 93: mod_base = OTHER; note = 2'-O-methyl modified nucleotide
  modified_base 94: mod_base = OTHER; note = 2'-O-methyl modified nucleotide
  modified_base 95: mod_base = OTHER; note = 2'-O-methyl modified nucleotide
  modified_base 96: mod_base = OTHER; note = 2'-O-methyl modified nucleotide
  modified_base 115: mod_base = OTHER; note = Nucleotide with phosphorothioate linkage
  modified_base 116: mod_base = OTHER; note = 2'-O-methyl modified nucleotide with phosphorothioate linkage
  modified_base 117: mod_base = OTHER; note = 2'-O-methyl modified nucleotide with phosphorothioate linkage
  modified_base 118: mod_base = OTHER; note = 2'-O-methyl modified nucleotide
gctggtacacggcagggtcagttttagagctagaaatagcaagttaaaataaggctagtccgttatcaacttgaaaaagtggcaccgagtcggtgccctgatagtgccctgccgtgta

SEQ ID NO: 16423 - RNA, 117 nt, synthetic construct
  source 1..117: mol_type = other RNA
  modified_base 1: mod_base = OTHER; note = 2'-O-methyl modified nucleotide with phosphorothioate linkage
  modified_base 2: mod_base = OTHER; note = 2'-O-methyl modified nucleotide with phosphorothioate linkage
  modified_base 3: mod_base = OTHER; note = 2'-O-methyl modified nucleotide with phosphorothioate linkage
  modified_base 29: mod_base = OTHER; note = 2'-O-methyl modified nucleotide
  modified_base 30: mod_base = OTHER; note = 2'-O-methyl modified nucleotide
  modified_base 31: mod_base = OTHER; note = 2'-O-methyl modified nucleotide
  modified_base 32: mod_base = OTHER; note = 2'-O-methyl modified nucleotide
  modified_base 33: mod_base = OTHER; note = 2'-O-methyl modified nucleotide
  modified_base 34: mod_base = OTHER; note = 2'-O-methyl modified nucleotide
  modified_base 35: mod_base = OTHER; note = 2'-O-methyl modified nucleotide
  modified_base 36: mod_base = OTHER; note = 2'-O-methyl modified nucleotide
  modified_base 37: mod_base = OTHER; note = 2'-O-methyl modified nucleotide
  modified_base 38: mod_base = OTHER; note = 2'-O-methyl modified nucleotide
  modified_base 39: mod_base = OTHER; note = 2'-O-methyl modified nucleotide
  modified_base 40: mod_base = OTHER; note = 2'-O-methyl modified nucleotide
  modified_base 69: mod_base = OTHER; note = 2'-O-methyl modified nucleotide
  modified_base 70: mod_base = OTHER; note = 2'-O-methyl modified nucleotide
  modified_base 71: mod_base = OTHER; note = 2'-O-methyl modified nucleotide
  modified_base 72: mod_base = OTHER; note = 2'-O-methyl modified nucleotide
  modified_base 73: mod_base = OTHER; note = 2'-O-methyl modified nucleotide
  modified_base 74: mod_base = OTHER; note = 2'-O-methyl modified nucleotide
  modified_base 75: mod_base = OTHER; note = 2'-O-methyl modified nucleotide
  modified_base 76: mod_base = OTHER; note = 2'-O-methyl modified nucleotide
  modified_base 77: mod_base = OTHER; note = 2'-O-methyl modified nucleotide
  modified_base 78: mod_base = OTHER; note = 2'-O-methyl modified nucleotide
  modified_base 79: mod_base = OTHER; note = 2'-O-methyl modified nucleotide
  modified_base 80: mod_base = OTHER; note = 2'-O-methyl modified nucleotide
  modified_base 81: mod_base = OTHER; note = 2'-O-methyl modified nucleotide
  modified_base 82: mod_base = OTHER; note = 2'-O-methyl modified nucleotide
  modified_base 83: mod_base = OTHER; note = 2'-O-methyl modified nucleotide
  modified_base 84: mod_base = OTHER; note = 2'-O-methyl modified nucleotide
  modified_base 85: mod_base = OTHER; note = 2'-O-methyl modified nucleotide
  modified_base 86: mod_base = OTHER; note = 2'-O-methyl modified nucleotide
  modified_base 87: mod_base = OTHER; note = 2'-O-methyl modified nucleotide
  modified_base 88: mod_base = OTHER; note = 2'-O-methyl modified nucleotide
  modified_base 89: mod_base = OTHER; note = 2'-O-methyl modified nucleotide
  modified_base 90: mod_base = OTHER; note = 2'-O-methyl modified nucleotide
  modified_base 91: mod_base = OTHER; note = 2'-O-methyl modified nucleotide
  modified_base 92: mod_base = OTHER; note = 2'-O-methyl modified nucleotide
  modified_base 93: mod_base = OTHER; note = 2'-O-methyl modified nucleotide
  modified_base 94: mod_base = OTHER; note = 2'-O-methyl modified nucleotide
  modified_base 95: mod_base = OTHER; note = 2'-O-methyl modified nucleotide
  modified_base 96: mod_base = OTHER; note = 2'-O-methyl modified nucleotide
  modified_base 114: mod_base = OTHER; note = Nucleotide with phosphorothioate linkage
  modified_base 115: mod_base = OTHER; note = 2'-O-methyl modified nucleotide with phosphorothioate linkage
  modified_base 116: mod_base = OTHER; note = 2'-O-methyl modified nucleotide with phosphorothioate linkage
  modified_base 117: mod_base = OTHER; note = 2'-O-methyl modified nucleotide
gctggtacacggcagggtcagttttagagctagaaatagcaagttaaaataaggctagtccgttatcaacttgaaaaagtggcaccgagtcggtgccctgatagtgccctgccgtgt

SEQ ID NO: 16424 - RNA, 116 nt, synthetic construct
  source 1..116: mol_type = other RNA
  modified_base 1: mod_base = OTHER; note = 2'-O-methyl modified nucleotide with phosphorothioate linkage
  modified_base 2: mod_base = OTHER; note = 2'-O-methyl modified nucleotide with phosphorothioate linkage
  modified_base 3: mod_base = OTHER; note = 2'-O-methyl modified nucleotide with phosphorothioate linkage
  modified_base 29: mod_base = OTHER; note = 2'-O-methyl modified nucleotide
  modified_base 30: mod_base = OTHER; note = 2'-O-methyl modified nucleotide
  modified_base 31: mod_base = OTHER; note = 2'-O-methyl modified nucleotide
  modified_base 32: mod_base = OTHER; note = 2'-O-methyl modified nucleotide
  modified_base 33: mod_base = OTHER; note = 2'-O-methyl modified nucleotide
  modified_base 34: mod_base = OTHER; note = 2'-O-methyl modified nucleotide
  modified_base 35: mod_base = OTHER; note = 2'-O-methyl modified nucleotide
  modified_base 36: mod_base = OTHER; note = 2'-O-methyl modified nucleotide
  modified_base 37: mod_base = OTHER; note = 2'-O-methyl modified nucleotide
  modified_base 38: mod_base = OTHER; note = 2'-O-methyl modified nucleotide
  modified_base 39: mod_base = OTHER; note = 2'-O-methyl modified nucleotide
  modified_base 40: mod_base = OTHER; note = 2'-O-methyl modified nucleotide
  modified_base 69: mod_base = OTHER; note = 2'-O-methyl modified nucleotide
  modified_base 70: mod_base = OTHER; note = 2'-O-methyl modified nucleotide
  modified_base 71: mod_base = OTHER; note = 2'-O-methyl modified nucleotide
  modified_base 72: mod_base = OTHER; note = 2'-O-methyl modified nucleotide
  modified_base 73: mod_base = OTHER; note = 2'-O-methyl modified nucleotide
  modified_base 74: mod_base = OTHER; note = 2'-O-methyl modified nucleotide
  modified_base 75: mod_base = OTHER; note = 2'-O-methyl modified nucleotide
  modified_base 76: mod_base = OTHER; note = 2'-O-methyl modified nucleotide
  modified_base 77: mod_base = OTHER; note = 2'-O-methyl modified nucleotide
  modified_base 78: mod_base = OTHER; note = 2'-O-methyl modified nucleotide
  modified_base 79: mod_base = OTHER; note = 2'-O-methyl modified nucleotide
  modified_base 80: mod_base = OTHER; note = 2'-O-methyl modified nucleotide
  modified_base 81: mod_base = OTHER; note = 2'-O-methyl modified nucleotide
  modified_base 82: mod_base = OTHER; note = 2'-O-methyl modified nucleotide
  modified_base 83: mod_base = OTHER; note = 2'-O-methyl modified nucleotide
  modified_base 84: mod_base = OTHER; note = 2'-O-methyl modified nucleotide
  modified_base 85: mod_base = OTHER; note = 2'-O-methyl modified nucleotide
  modified_base 86: mod_base = OTHER; note = 2'-O-methyl modified nucleotide
  modified_base 87: mod_base = OTHER; note = 2'-O-methyl modified nucleotide
  modified_base 88: mod_base = OTHER; note = 2'-O-methyl modified nucleotide
  modified_base 89: mod_base = OTHER; note = 2'-O-methyl modified nucleotide
  modified_base 90: mod_base = OTHER; note = 2'-O-methyl modified nucleotide
  modified_base 91: mod_base = OTHER; note = 2'-O-methyl modified nucleotide
  modified_base 92: mod_base = OTHER; note = 2'-O-methyl modified nucleotide
  modified_base 93: mod_base = OTHER; note = 2'-O-methyl modified nucleotide
  modified_base 94: mod_base = OTHER; note = 2'-O-methyl modified nucleotide
  modified_base 95: mod_base = OTHER; note = 2'-O-methyl modified nucleotide
  modified_base 96: mod_base = OTHER; note = 2'-O-methyl modified nucleotide
  modified_base 113: mod_base = OTHER; note = Nucleotide with phosphorothioate linkage
  modified_base 114: mod_base = OTHER; note = 2'-O-methyl modified nucleotide with phosphorothioate linkage
  modified_base 115: mod_base = OTHER; note = 2'-O-methyl modified nucleotide with phosphorothioate linkage
  modified_base 116: mod_base = OTHER; note = 2'-O-methyl modified nucleotide
gctggtacacggcagggtcagttttagagctagaaatagcaagttaaaataaggctagtccgttatcaacttgaaaaagtggcaccgagtcggtgccctgatagtgccctgccgtg

SEQ ID NO: 16425 - RNA, 115 nt, synthetic construct
  source 1..115: mol_type = other RNA
  modified_base 1: mod_base = OTHER; note = 2'-O-methyl modified nucleotide with phosphorothioate linkage
  modified_base 2: mod_base = OTHER; note = 2'-O-methyl modified nucleotide with phosphorothioate linkage
  modified_base 3: mod_base = OTHER; note = 2'-O-methyl modified nucleotide with phosphorothioate linkage
  modified_base 29: mod_base = OTHER; note = 2'-O-methyl modified nucleotide
  modified_base 30: mod_base = OTHER; note = 2'-O-methyl modified nucleotide
  modified_base 31: mod_base = OTHER; note = 2'-O-methyl modified nucleotide
  modified_base 32: mod_base = OTHER; note = 2'-O-methyl modified nucleotide
  modified_base 33: mod_base = OTHER; note = 2'-O-methyl modified nucleotide
  modified_base 34: mod_base = OTHER; note = 2'-O-methyl modified nucleotide
  modified_base 35: mod_base = OTHER; note = 2'-O-methyl modified nucleotide
  modified_base 36: mod_base = OTHER; note = 2'-O-methyl modified nucleotide
  modified_base 37: mod_base = OTHER; note = 2'-O-methyl modified nucleotide
  modified_base 38: mod_base = OTHER; note = 2'-O-methyl modified nucleotide
  modified_base 39: mod_base = OTHER; note = 2'-O-methyl modified nucleotide
  modified_base 40: mod_base = OTHER; note = 2'-O-methyl modified nucleotide
  modified_base 69: mod_base = OTHER; note = 2'-O-methyl modified nucleotide
  modified_base 70: mod_base = OTHER; note = 2'-O-methyl modified nucleotide
  modified_base 71: mod_base = OTHER; note = 2'-O-methyl modified nucleotide
  modified_base 72: mod_base = OTHER; note = 2'-O-methyl modified nucleotide
  modified_base 73: mod_base = OTHER; note = 2'-O-methyl modified nucleotide
  modified_base 74: mod_base = OTHER; note = 2'-O-methyl modified nucleotide
  modified_base 75: mod_base = OTHER; note = 2'-O-methyl modified nucleotide
  modified_base 76: mod_base = OTHER; note = 2'-O-methyl modified nucleotide
  modified_base 77: mod_base = OTHER; note = 2'-O-methyl modified nucleotide
  modified_base 78: mod_base = OTHER; note = 2'-O-methyl modified nucleotide
  modified_base 79: mod_base = OTHER; note = 2'-O-methyl modified nucleotide
  modified_base 80: mod_base = OTHER; note = 2'-O-methyl modified nucleotide
  modified_base 81: mod_base = OTHER; note = 2'-O-methyl modified nucleotide
  modified_base 82: mod_base = OTHER; note = 2'-O-methyl modified nucleotide
  modified_base 83: mod_base = OTHER; note = 2'-O-methyl modified nucleotide
  modified_base 84: mod_base = OTHER; note = 2'-O-methyl modified nucleotide
  modified_base 85: mod_base = OTHER; note = 2'-O-methyl modified nucleotide
  modified_base 86: mod_base = OTHER; note = 2'-O-methyl modified nucleotide
  modified_base 87: mod_base = OTHER; note = 2'-O-methyl modified nucleotide
  modified_base 88: mod_base = OTHER; note = 2'-O-methyl modified nucleotide
  modified_base 89: mod_base = OTHER; note = 2'-O-methyl modified nucleotide
  modified_base 90: mod_base = OTHER; note = 2'-O-methyl modified nucleotide
  modified_base 91: mod_base = OTHER; note = 2'-O-methyl modified nucleotide
  modified_base 92: mod_base = OTHER; note = 2'-O-methyl modified nucleotide
  modified_base 93: mod_base = OTHER; note = 2'-O-methyl modified nucleotide
  modified_base 94: mod_base = OTHER; note = 2'-O-methyl modified nucleotide
  modified_base 95: mod_base = OTHER; note = 2'-O-methyl modified nucleotide
  modified_base 96: mod_base = OTHER; note = 2'-O-methyl modified nucleotide
  modified_base 112: mod_base = OTHER; note = Nucleotide with phosphorothioate linkage
  modified_base 113: mod_base = OTHER; note = 2'-O-methyl modified nucleotide with phosphorothioate linkage
  modified_base 114: mod_base = OTHER; note = 2'-O-methyl modified nucleotide with phosphorothioate linkage
  modified_base 115: mod_base = OTHER; note = 2'-O-methyl modified nucleotide
gctggtacacggcagggtcagttttagagctagaaatagcaagttaaaataaggctagtccgttatcaacttgaaaaagtggcaccgagtcggtgccctgatagtgccctgccgt

SEQ ID NO: 16426 - RNA, 114 nt, synthetic construct
  source 1..114: mol_type = other RNA
  modified_base 1: mod_base = OTHER; note = 2'-O-methyl modified nucleotide with phosphorothioate linkage
  modified_base 2: mod_base = OTHER; note = 2'-O-methyl modified nucleotide with phosphorothioate linkage
  modified_base 3: mod_base = OTHER; note = 2'-O-methyl modified nucleotide with phosphorothioate linkage
  modified_base 29: mod_base = OTHER; note = 2'-O-methyl modified nucleotide
  modified_base 30: mod_base = OTHER; note = 2'-O-methyl modified nucleotide
  modified_base 31: mod_base = OTHER; note = 2'-O-methyl modified nucleotide
  modified_base 32: mod_base = OTHER; note = 2'-O-methyl modified nucleotide
  modified_base 33: mod_base = OTHER; note = 2'-O-methyl modified nucleotide
  modified_base 34: mod_base = OTHER; note = 2'-O-methyl modified nucleotide
  modified_base 35: mod_base = OTHER; note = 2'-O-methyl modified nucleotide
  modified_base 36: mod_base = OTHER; note = 2'-O-methyl modified nucleotide
  modified_base 37: mod_base = OTHER; note = 2'-O-methyl modified nucleotide
  modified_base 38: mod_base = OTHER; note = 2'-O-methyl modified nucleotide
  modified_base 39: mod_base = OTHER; note = 2'-O-methyl modified nucleotide
  modified_base 40: mod_base = OTHER; note = 2'-O-methyl modified nucleotide
  modified_base 69: mod_base = OTHER; note = 2'-O-methyl modified nucleotide
  modified_base 70: mod_base = OTHER; note = 2'-O-methyl modified nucleotide
  modified_base 71: mod_base = OTHER; note = 2'-O-methyl modified nucleotide
  modified_base 72: mod_base = OTHER; note = 2'-O-methyl modified nucleotide
  modified_base 73: mod_base = OTHER; note = 2'-O-methyl modified nucleotide
  modified_base 74: mod_base = OTHER; note = 2'-O-methyl modified nucleotide
  modified_base 75: mod_base = OTHER; note = 2'-O-methyl modified nucleotide
  modified_base 76: mod_base = OTHER; note = 2'-O-methyl modified nucleotide
  modified_base 77: mod_base = OTHER; note = 2'-O-methyl modified nucleotide
  modified_base 78: mod_base = OTHER; note = 2'-O-methyl modified nucleotide
  modified_base 79: mod_base = OTHER; note = 2'-O-methyl modified nucleotide
  modified_base 80: mod_base = OTHER; note = 2'-O-methyl modified nucleotide
  modified_base 81: mod_base = OTHER; note = 2'-O-methyl modified nucleotide
  modified_base 82: mod_base = OTHER; note = 2'-O-methyl modified nucleotide
  modified_base 83: mod_base = OTHER; note = 2'-O-methyl modified nucleotide
  modified_base 84: mod_base = OTHER; note = 2'-O-methyl modified nucleotide
  modified_base 85: mod_base = OTHER; note = 2'-O-methyl modified nucleotide
  modified_base 86: mod_base = OTHER; note = 2'-O-methyl modified nucleotide
  modified_base 87: mod_base = OTHER; note = 2'-O-methyl modified nucleotide
  modified_base 88: mod_base = OTHER; note = 2'-O-methyl modified nucleotide
  modified_base 89: mod_base = OTHER; note = 2'-O-methyl modified nucleotide
  modified_base 90: mod_base = OTHER; note = 2'-O-methyl modified nucleotide
  modified_base 91: mod_base = OTHER; note = 2'-O-methyl modified nucleotide
  modified_base 92: mod_base = OTHER; note = 2'-O-methyl modified nucleotide
  modified_base 93: mod_base = OTHER; note = 2'-O-methyl modified nucleotide
  modified_base 94: mod_base = OTHER; note = 2'-O-methyl modified nucleotide
  modified_base 95: mod_base = OTHER; note = 2'-O-methyl modified nucleotide
  modified_base 96: mod_base = OTHER; note = 2'-O-methyl modified nucleotide
  modified_base 111: mod_base = OTHER; note = Nucleotide with phosphorothioate linkage
  modified_base 112: mod_base = OTHER; note = 2'-O-methyl modified nucleotide with phosphorothioate linkage
  modified_base 113: mod_base = OTHER; note = 2'-O-methyl modified nucleotide with phosphorothioate linkage
  modified_base 114: mod_base = OTHER; note = 2'-O-methyl modified nucleotide
gctggtacacggcagggtcagttttagagctagaaatagcaagttaaaataaggctagtccgttatcaacttgaaaaagtggcaccgagtcggtgccctgatagtgccctgccg

SEQ ID NO: 16427 - RNA, 121 nt, synthetic construct
  source 1..121: mol_type = other RNA
  modified_base 1: mod_base = OTHER; note = 2'-O-methyl modified nucleotide with phosphorothioate linkage
  modified_base 2: mod_base = OTHER; note = 2'-O-methyl modified nucleotide with phosphorothioate linkage
  modified_base 3: mod_base = OTHER; note = 2'-O-methyl modified nucleotide with phosphorothioate linkage
  modified_base 29: mod_base = OTHER; note = 2'-O-methyl modified nucleotide
  modified_base 30: mod_base = OTHER; note = 2'-O-methyl modified nucleotide
  modified_base 31: mod_base = OTHER; note = 2'-O-methyl modified nucleotide
  modified_base 32: mod_base = OTHER; note = 2'-O-methyl modified nucleotide
  modified_base 33: mod_base = OTHER; note = 2'-O-methyl modified nucleotide
  modified_base 34: mod_base = OTHER; note = 2'-O-methyl modified nucleotide
  modified_base 35: mod_base = OTHER; note = 2'-O-methyl modified nucleotide
  modified_base 36: mod_base = OTHER; note = 2'-O-methyl modified nucleotide
  modified_base 37: mod_base = OTHER; note = 2'-O-methyl modified nucleotide
  modified_base 38: mod_base = OTHER; note = 2'-O-methyl modified nucleotide
  modified_base 39: mod_base = OTHER; note = 2'-O-methyl modified nucleotide
  modified_base 40: mod_base = OTHER; note = 2'-O-methyl modified nucleotide
  modified_base 69: mod_base = OTHER; note = 2'-O-methyl modified nucleotide
  modified_base 70: mod_base = OTHER; note = 2'-O-methyl modified nucleotide
  modified_base 71: mod_base = OTHER; note = 2'-O-methyl modified nucleotide
  modified_base 72: mod_base = OTHER; note = 2'-O-methyl modified nucleotide
  modified_base 73: mod_base = OTHER; note = 2'-O-methyl modified nucleotide
  modified_base 74: mod_base = OTHER; note = 2'-O-methyl modified nucleotide
  modified_base 75: mod_base = OTHER; note = 2'-O-methyl modified nucleotide
  modified_base 76: mod_base = OTHER; note = 2'-O-methyl modified nucleotide
  modified_base 77: mod_base = OTHER; note = 2'-O-methyl modified nucleotide
  modified_base 78: mod_base = OTHER; note = 2'-O-methyl modified nucleotide
  modified_base 79: mod_base = OTHER; note = 2'-O-methyl modified nucleotide
  modified_base 80: mod_base = OTHER; note = 2'-O-methyl modified nucleotide
  modified_base 81: mod_base = OTHER; note = 2'-O-methyl modified nucleotide
  modified_base 82: mod_base = OTHER; note = 2'-O-methyl modified nucleotide
  modified_base 83: mod_base = OTHER; note = 2'-O-methyl modified nucleotide
  modified_base 84: mod_base = OTHER; note = 2'-O-methyl modified nucleotide
  modified_base 85: mod_base = OTHER; note = 2'-O-methyl modified nucleotide
  modified_base 86: mod_base = OTHER; note = 2'-O-methyl modified nucleotide
  modified_base 87: mod_base = OTHER; note = 2'-O-methyl modified nucleotide
  modified_base 88: mod_base = OTHER; note = 2'-O-methyl modified nucleotide
  modified_base 89: mod_base = OTHER; note = 2'-O-methyl modified nucleotide
  modified_base 90: mod_base = OTHER; note = 2'-O-methyl modified nucleotide
  modified_base 91: mod_base = OTHER; note = 2'-O-methyl modified nucleotide
  modified_base 92: mod_base = OTHER; note = 2'-O-methyl modified nucleotide
  modified_base 93: mod_base = OTHER; note = 2'-O-methyl modified nucleotide
  modified_base 94: mod_base = OTHER; note = 2'-O-methyl modified nucleotide
  modified_base 95: mod_base = OTHER; note = 2'-O-methyl modified nucleotide
  modified_base 96: mod_base = OTHER; note = 2'-O-methyl modified nucleotide
  modified_base 118: mod_base = OTHER; note = Nucleotide with phosphorothioate linkage
  modified_base 119: mod_base = OTHER; note = 2'-O-methyl modified nucleotide with phosphorothioate linkage
  modified_base 120: mod_base = OTHER; note = 2'-O-methyl modified nucleotide with phosphorothioate linkage
  modified_base 121: mod_base = OTHER; note = 2'-O-methyl modified nucleotide
gctggtacacggcagggtcagttttagagctagaaatagcaagttaaaataaggctagtccgttatcaacttgaaaaagtggcaccgagtcggtgcaccctgatagtgccctgccgtgtac

SEQ ID NO: 16428 - RNA, 120 nt, synthetic construct
  source 1..120: mol_type = other RNA
  modified_base 1: mod_base = OTHER; note = 2'-O-methyl modified nucleotide with phosphorothioate linkage
  modified_base 2: mod_base = OTHER; note = 2'-O-methyl modified nucleotide with phosphorothioate linkage
  modified_base 3: mod_base = OTHER; note = 2'-O-methyl modified nucleotide with phosphorothioate linkage
  modified_base 29: mod_base = OTHER; note = 2'-O-methyl modified nucleotide
  modified_base 30: mod_base = OTHER; note = 2'-O-methyl modified nucleotide
  modified_base 31: mod_base = OTHER; note = 2'-O-methyl modified nucleotide
  modified_base 32: mod_base = OTHER; note = 2'-O-methyl modified nucleotide
  modified_base 33: mod_base = OTHER; note = 2'-O-methyl modified nucleotide
  modified_base 34: mod_base = OTHER; note = 2'-O-methyl modified nucleotide
  modified_base 35: mod_base = OTHER; note = 2'-O-methyl modified nucleotide
  modified_base 36: mod_base = OTHER; note = 2'-O-methyl modified nucleotide
  modified_base 37: mod_base = OTHER; note = 2'-O-methyl modified nucleotide
  modified_base 38: mod_base = OTHER; note = 2'-O-methyl modified nucleotide
  modified_base 39: mod_base = OTHER; note = 2'-O-methyl modified nucleotide
  modified_base 40: mod_base = OTHER; note = 2'-O-methyl modified nucleotide
  modified_base 69: mod_base = OTHER; note = 2'-O-methyl modified nucleotide
  modified_base 70: mod_base = OTHER; note = 2'-O-methyl modified nucleotide
  modified_base 71: mod_base = OTHER; note = 2'-O-methyl modified nucleotide
  modified_base 72: mod_base = OTHER; note = 2'-O-methyl modified nucleotide
  modified_base 73: mod_base = OTHER; note = 2'-O-methyl modified nucleotide
  modified_base 74: mod_base = OTHER; note = 2'-O-methyl modified nucleotide
  modified_base 75: mod_base = OTHER; note = 2'-O-methyl modified nucleotide
  modified_base 76: mod_base = OTHER; note = 2'-O-methyl modified nucleotide
  modified_base 77: mod_base = OTHER; note = 2'-O-methyl modified nucleotide
  modified_base 78: mod_base = OTHER; note = 2'-O-methyl modified nucleotide
  modified_base 79: mod_base = OTHER; note = 2'-O-methyl modified nucleotide
  modified_base 80: mod_base = OTHER; note = 2'-O-methyl modified nucleotide
  modified_base 81: mod_base = OTHER; note = 2'-O-methyl modified nucleotide
  modified_base 82: mod_base = OTHER; note = 2'-O-methyl modified nucleotide
  modified_base 83: mod_base = OTHER; note = 2'-O-methyl modified nucleotide
  modified_base 84: mod_base = OTHER; note = 2'-O-methyl modified nucleotide
  modified_base 85: mod_base = OTHER; note = 2'-O-methyl modified nucleotide
  modified_base 86: mod_base = OTHER; note = 2'-O-methyl modified nucleotide
  modified_base 87: mod_base = OTHER; note = 2'-O-methyl modified nucleotide
  modified_base 88: mod_base = OTHER; note = 2'-O-methyl modified nucleotide
  modified_base 89: mod_base = OTHER; note = 2'-O-methyl modified nucleotide
  modified_base 90: mod_base = OTHER; note = 2'-O-methyl modified nucleotide
  modified_base 91: mod_base = OTHER; note = 2'-O-methyl modified nucleotide
  modified_base 92: mod_base = OTHER; note = 2'-O-methyl modified nucleotide
  modified_base 93: mod_base = OTHER; note = 2'-O-methyl modified nucleotide
  modified_base 94: mod_base = OTHER; note = 2'-O-methyl modified nucleotide
  modified_base 95: mod_base = OTHER; note = 2'-O-methyl modified nucleotide
  modified_base 96: mod_base = OTHER; note = 2'-O-methyl modified nucleotide
  modified_base 117: mod_base = OTHER; note = Nucleotide with phosphorothioate linkage
  modified_base 118: mod_base = OTHER; note = 2'-O-methyl modified nucleotide with phosphorothioate linkage
  modified_base 119: mod_base = OTHER; note = 2'-O-methyl modified nucleotide with phosphorothioate linkage
  modified_base 120: mod_base = OTHER; note = 2'-O-methyl modified nucleotide
gctggtacacggcagggtcagttttagagctagaaatagcaagttaaaataaggctagtccgttatcaacttgaaaaagtggcaccgagtcggtgcaccctgatagtgccctgccgtgta

SEQ ID NO: 16429 - RNA, 119 nt, synthetic construct
  source 1..119: mol_type = other RNA
  modified_base 1: mod_base = OTHER; note = 2'-O-methyl modified nucleotide with phosphorothioate linkage
  modified_base 2: mod_base = OTHER; note = 2'-O-methyl modified nucleotide with phosphorothioate linkage
  modified_base 3: mod_base = OTHER; note = 2'-O-methyl modified nucleotide with phosphorothioate linkage
  modified_base 29: mod_base = OTHER; note = 2'-O-methyl modified nucleotide
  modified_base 30: mod_base = OTHER; note = 2'-O-methyl modified nucleotide
  modified_base 31: mod_base = OTHER; note = 2'-O-methyl modified nucleotide
  modified_base 32: mod_base = OTHER; note = 2'-O-methyl modified nucleotide
  modified_base 33: mod_base = OTHER; note = 2'-O-methyl modified nucleotide
  modified_base 34: mod_base = OTHER; note = 2'-O-methyl modified nucleotide
  modified_base 35: mod_base = OTHER; note = 2'-O-methyl modified nucleotide
  modified_base 36: mod_base = OTHER; note = 2'-O-methyl modified nucleotide
  modified_base 37: mod_base = OTHER; note = 2'-O-methyl modified nucleotide
  modified_base 38: mod_base = OTHER; note = 2'-O-methyl modified nucleotide
  modified_base 39: mod_base = OTHER; note = 2'-O-methyl modified nucleotide
  modified_base 40: mod_base = OTHER; note = 2'-O-methyl modified nucleotide
  modified_base 69: mod_base = OTHER; note = 2'-O-methyl modified nucleotide
  modified_base 70: mod_base = OTHER; note = 2'-O-methyl modified nucleotide
  modified_base 71: mod_base = OTHER; note = 2'-O-methyl modified nucleotide
  modified_base 72: mod_base = OTHER; note = 2'-O-methyl modified nucleotide
  modified_base 73: mod_base = OTHER; note = 2'-O-methyl modified nucleotide
  modified_base 74: mod_base = OTHER; note = 2'-O-methyl modified nucleotide
  modified_base 75: mod_base = OTHER; note = 2'-O-methyl modified nucleotide
  modified_base 76: mod_base = OTHER; note = 2'-O-methyl modified nucleotide
  modified_base 77: mod_base = OTHER; note = 2'-O-methyl modified nucleotide
  modified_base 78: mod_base = OTHER; note = 2'-O-methyl modified nucleotide
  modified_base 79: mod_base = OTHER; note = 2'-O-methyl modified nucleotide
  modified_base 80: mod_base = OTHER; note = 2'-O-methyl modified nucleotide
  modified_base 81: mod_base = OTHER; note = 2'-O-methyl modified nucleotide
  modified_base 82: mod_base = OTHER; note = 2'-O-methyl modified nucleotide
  modified_base 83: mod_base = OTHER; note = 2'-O-methyl modified nucleotide
  modified_base 84: mod_base = OTHER; note = 2'-O-methyl modified nucleotide
  modified_base 85: mod_base = OTHER; note = 2'-O-methyl modified nucleotide
  modified_base 86: mod_base = OTHER; note = 2'-O-methyl modified nucleotide
  modified_base 87: mod_base = OTHER; note = 2'-O-methyl modified nucleotide
  modified_base 88: mod_base = OTHER; note = 2'-O-methyl modified nucleotide
  modified_base 89: mod_base = OTHER; note = 2'-O-methyl modified nucleotide
  modified_base 90: mod_base = OTHER; note = 2'-O-methyl modified nucleotide
  modified_base 91: mod_base = OTHER; note = 2'-O-methyl modified nucleotide
  modified_base 92: mod_base = OTHER; note = 2'-O-methyl modified nucleotide
  modified_base 93: mod_base = OTHER; note = 2'-O-methyl modified nucleotide
  modified_base 94: mod_base = OTHER; note = 2'-O-methyl modified nucleotide
  modified_base 95: mod_base = OTHER; note = 2'-O-methyl modified nucleotide
  modified_base 96: mod_base = OTHER; note = 2'-O-methyl modified nucleotide
  modified_base 116: mod_base = OTHER; note = Nucleotide with phosphorothioate linkage
  modified_base 117: mod_base = OTHER; note = 2'-O-methyl modified nucleotide with phosphorothioate linkage
  modified_base 118: mod_base = OTHER; note = 2'-O-methyl modified nucleotide with phosphorothioate linkage
  modified_base 119: mod_base = OTHER; note = 2'-O-methyl modified nucleotide
gctggtacacggcagggtcagttttagagctagaaatagcaagttaaaataaggctagtccgttatcaacttgaaaaagtggcaccgagtcggtgcaccctgatagtgccctgccgtgt

SEQ ID NO: 16430 - RNA, 118 nt, synthetic construct
  source 1..118: mol_type = other RNA
  modified_base 1: mod_base = OTHER; note = 2'-O-methyl modified nucleotide with phosphorothioate linkage
  modified_base 2: mod_base = OTHER; note = 2'-O-methyl modified nucleotide with phosphorothioate linkage
  modified_base 3: mod_base = OTHER; note = 2'-O-methyl modified nucleotide with phosphorothioate linkage
  modified_base 29: mod_base = OTHER; note = 2'-O-methyl modified nucleotide
  modified_base 30: mod_base = OTHER; note = 2'-O-methyl modified nucleotide
  modified_base 31: mod_base = OTHER; note = 2'-O-methyl modified nucleotide
  modified_base 32: mod_base = OTHER; note = 2'-O-methyl modified nucleotide
  modified_base 33: mod_base = OTHER; note = 2'-O-methyl modified nucleotide
  modified_base 34: mod_base = OTHER; note = 2'-O-methyl modified nucleotide
  modified_base 35: mod_base = OTHER; note = 2'-O-methyl modified nucleotide
  modified_base 36: mod_base = OTHER; note = 2'-O-methyl modified nucleotide
  modified_base 37: mod_base = OTHER; note = 2'-O-methyl modified nucleotide
  modified_base 38: mod_base = OTHER; note = 2'-O-methyl modified nucleotide
  modified_base 39: mod_base = OTHER; note = 2'-O-methyl modified nucleotide
  modified_base 40: mod_base = OTHER; note = 2'-O-methyl modified nucleotide
  modified_base 69: mod_base = OTHER; note = 2'-O-methyl modified nucleotide
  modified_base 70: mod_base = OTHER; note = 2'-O-methyl modified nucleotide
  modified_base 71: mod_base = OTHER; note = 2'-O-methyl modified nucleotide
  modified_base 72: mod_base = OTHER; note = 2'-O-methyl modified nucleotide
  modified_base 73: mod_base = OTHER; note = 2'-O-methyl modified nucleotide
  modified_base 74: mod_base = OTHER; note = 2'-O-methyl modified nucleotide
  modified_base 75: mod_base = OTHER; note = 2'-O-methyl modified nucleotide
  modified_base 76: mod_base = OTHER; note = 2'-O-methyl modified nucleotide
  modified_base 77: mod_base = OTHER; note = 2'-O-methyl modified nucleotide
  modified_base 78: mod_base = OTHER; note = 2'-O-methyl modified nucleotide
  modified_base 79: mod_base = OTHER; note = 2'-O-methyl modified nucleotide
  modified_base 80: mod_base = OTHER; note = 2'-O-methyl modified nucleotide
  modified_base 81: mod_base = OTHER; note = 2'-O-methyl modified nucleotide
  modified_base 82: mod_base = OTHER; note = 2'-O-methyl modified nucleotide
  modified_base 83: mod_base = OTHER; note = 2'-O-methyl modified nucleotide
  modified_base 84: mod_base = OTHER; note = 2'-O-methyl modified nucleotide
  modified_base 85: mod_base = OTHER; note = 2'-O-methyl modified nucleotide
  modified_base 86: mod_base = OTHER; note = 2'-O-methyl modified nucleotide
  modified_base 87: mod_base = OTHER; note = 2'-O-methyl modified nucleotide
  modified_base 88: mod_base = OTHER; note = 2'-O-methyl modified nucleotide
  modified_base 89: mod_base = OTHER; note = 2'-O-methyl modified nucleotide
  modified_base 90: mod_base = OTHER; note = 2'-O-methyl modified nucleotide
  modified_base 91: mod_base = OTHER; note = 2'-O-methyl modified nucleotide
  modified_base 92: mod_base = OTHER; note = 2'-O-methyl modified nucleotide
  modified_base 93: mod_base = OTHER; note = 2'-O-methyl modified nucleotide
  modified_base 94: mod_base = OTHER; note = 2'-O-methyl modified nucleotide
  modified_base 95: mod_base = OTHER; note = 2'-O-methyl modified nucleotide
  modified_base 96: mod_base = OTHER; note = 2'-O-methyl modified nucleotide
  modified_base 115: mod_base = OTHER; note = Nucleotide with phosphorothioate linkage
  modified_base 116: mod_base = OTHER; note = 2'-O-methyl modified nucleotide with phosphorothioate linkage
  modified_base 117: mod_base = OTHER; note = 2'-O-methyl modified nucleotide with phosphorothioate linkage
  modified_base 118: mod_base = OTHER; note = 2'-O-methyl modified nucleotide
gctggtacacggcagggtcagttttagagctagaaatagcaagttaaaataaggctagtccgttatcaacttgaaaaagtggcaccgagtcggtgcaccctgatagtgccctgccgtg

SEQ ID NO: 16431 - RNA, 117 nt, synthetic construct
  source 1..117: mol_type = other RNA
  modified_base 1: mod_base = OTHER; note = 2'-O-methyl modified nucleotide with phosphorothioate linkage
  modified_base 2: mod_base = OTHER; note = 2'-O-methyl modified nucleotide with phosphorothioate linkage
  modified_base 3: mod_base = OTHER; note = 2'-O-methyl modified nucleotide with phosphorothioate linkage
  modified_base 29: mod_base = OTHER; note = 2'-O-methyl modified nucleotide
  modified_base 30: mod_base = OTHER; note = 2'-O-methyl modified nucleotide
  modified_base 31: mod_base = OTHER; note = 2'-O-methyl modified nucleotide
  modified_base 32: mod_base = OTHER; note = 2'-O-methyl modified nucleotide
  modified_base 33: mod_base = OTHER; note = 2'-O-methyl modified nucleotide
  modified_base 34: mod_base = OTHER; note = 2'-O-methyl modified nucleotide
  modified_base 35: mod_base = OTHER; note = 2'-O-methyl modified nucleotide
  modified_base 36: mod_base = OTHER; note = 2'-O-methyl modified nucleotide
  modified_base 37: mod_base = OTHER; note = 2'-O-methyl modified nucleotide
  modified_base 38: mod_base = OTHER; note = 2'-O-methyl modified nucleotide
  modified_base 39: mod_base = OTHER; note = 2'-O-methyl modified nucleotide
  modified_base 40: mod_base = OTHER; note = 2'-O-methyl modified nucleotide
  modified_base 69: mod_base = OTHER; note = 2'-O-methyl modified nucleotide
  modified_base 70: mod_base = OTHER; note = 2'-O-methyl modified nucleotide
  modified_base 71: mod_base = OTHER; note = 2'-O-methyl modified nucleotide
  modified_base 72: mod_base = OTHER; note = 2'-O-methyl modified nucleotide
  modified_base 73: mod_base = OTHER; note = 2'-O-methyl modified nucleotide
  modified_base 74: mod_base = OTHER; note = 2'-O-methyl modified nucleotide
  modified_base 75: mod_base = OTHER; note = 2'-O-methyl modified nucleotide
  modified_base 76: mod_base = OTHER; note = 2'-O-methyl modified nucleotide
  modified_base 77: mod_base = OTHER; note = 2'-O-methyl modified nucleotide
  modified_base 78: mod_base = OTHER; note = 2'-O-methyl modified nucleotide
  modified_base 79: mod_base = OTHER; note = 2'-O-methyl modified nucleotide
  modified_base 80: mod_base = OTHER; note = 2'-O-methyl modified nucleotide
  modified_base 81: mod_base = OTHER; note = 2'-O-methyl modified nucleotide
  modified_base 82: mod_base = OTHER; note = 2'-O-methyl modified nucleotide
  modified_base 83: mod_base = OTHER; note = 2'-O-methyl modified nucleotide
  modified_base 84: mod_base = OTHER; note = 2'-O-methyl modified nucleotide
  modified_base 85: mod_base = OTHER; note = 2'-O-methyl modified nucleotide
  modified_base 86: mod_base = OTHER; note = 2'-O-methyl modified nucleotide
  modified_base 87: mod_base = OTHER; note = 2'-O-methyl modified nucleotide
  modified_base 88: mod_base = OTHER; note = 2'-O-methyl modified nucleotide
  modified_base 89: mod_base = OTHER; note = 2'-O-methyl modified nucleotide
  modified_base 90: mod_base = OTHER; note = 2'-O-methyl modified nucleotide
  modified_base 91: mod_base = OTHER; note = 2'-O-methyl modified nucleotide
  modified_base 92: mod_base = OTHER; note = 2'-O-methyl modified nucleotide
  modified_base 93: mod_base = OTHER; note = 2'-O-methyl modified nucleotide
  modified_base 94: mod_base = OTHER; note = 2'-O-methyl modified nucleotide
  modified_base 95: mod_base = OTHER; note = 2'-O-methyl modified nucleotide
  modified_base 96: mod_base = OTHER; note = 2'-O-methyl modified nucleotide
  modified_base 114: mod_base = OTHER; note = Nucleotide with phosphorothioate linkage
  modified_base 115: mod_base = OTHER; note = 2'-O-methyl modified nucleotide with phosphorothioate linkage
  modified_base 116: mod_base = OTHER; note = 2'-O-methyl modified nucleotide with phosphorothioate linkage
  modified_base 117: mod_base = OTHER; note = 2'-O-methyl modified nucleotide
gctggtacacggcagggtcagttttagagctagaaatagcaagttaaaataaggctagtccgttatcaacttgaaaaagtggcaccgagtcggtgcaccctgatagtgccctgccgt

SEQ ID NO: 16432 - RNA, 116 nt, synthetic construct
  source 1..116: mol_type = other RNA
  modified_base 1: mod_base = OTHER; note = 2'-O-methyl modified nucleotide with phosphorothioate linkage
  modified_base 2: mod_base = OTHER; note = 2'-O-methyl modified nucleotide with phosphorothioate linkage
  modified_base 3: mod_base = OTHER; note = 2'-O-methyl modified nucleotide with phosphorothioate linkage
  modified_base 29: mod_base = OTHER; note = 2'-O-methyl modified nucleotide
  modified_base 30: mod_base = OTHER; note = 2'-O-methyl modified nucleotide
  modified_base 31: mod_base = OTHER; note = 2'-O-methyl modified nucleotide
  modified_base 32: mod_base = OTHER; note = 2'-O-methyl modified nucleotide
  modified_base 33: mod_base = OTHER; note = 2'-O-methyl modified nucleotide
  modified_base 34: mod_base = OTHER; note = 2'-O-methyl modified nucleotide
  modified_base 35: mod_base = OTHER; note = 2'-O-methyl modified nucleotide
  modified_base 36: mod_base = OTHER; note = 2'-O-methyl modified nucleotide
  modified_base 37: mod_base = OTHER; note = 2'-O-methyl modified nucleotide
  modified_base 38: mod_base = OTHER; note = 2'-O-methyl modified nucleotide
  modified_base 39: mod_base = OTHER; note = 2'-O-methyl modified nucleotide
  modified_base 40: mod_base = OTHER; note = 2'-O-methyl modified nucleotide
  modified_base 69: mod_base = OTHER; note = 2'-O-methyl modified nucleotide
  modified_base 70: mod_base = OTHER; note = 2'-O-methyl modified nucleotide
  modified_base 71: mod_base = OTHER; note = 2'-O-methyl modified nucleotide
  modified_base 72: mod_base = OTHER; note = 2'-O-methyl modified nucleotide
  modified_base 73: mod_base = OTHER; note = 2'-O-methyl modified nucleotide
  modified_base 74: mod_base = OTHER; note = 2'-O-methyl modified nucleotide
  modified_base 75: mod_base = OTHER; note = 2'-O-methyl modified nucleotide
  modified_base 76: mod_base = OTHER; note = 2'-O-methyl modified nucleotide
  modified_base 77: mod_base = OTHER; note = 2'-O-methyl modified nucleotide
  modified_base 78: mod_base = OTHER; note = 2'-O-methyl modified nucleotide
  modified_base 79: mod_base = OTHER; note = 2'-O-methyl modified nucleotide
  modified_base 80: mod_base = OTHER; note = 2'-O-methyl modified nucleotide
  modified_base 81: mod_base = OTHER; note = 2'-O-methyl modified nucleotide
  modified_base 82: mod_base = OTHER; note = 2'-O-methyl modified nucleotide
  modified_base 83: mod_base = OTHER; note = 2'-O-methyl modified nucleotide
  modified_base 84: mod_base = OTHER; note = 2'-O-methyl modified nucleotide
  modified_base 85: mod_base = OTHER; note = 2'-O-methyl modified nucleotide
  modified_base 86: mod_base = OTHER; note = 2'-O-methyl modified nucleotide
  modified_base 87: mod_base = OTHER; note = 2'-O-methyl modified nucleotide
  modified_base 88: mod_base = OTHER; note = 2'-O-methyl modified nucleotide
  modified_base 89: mod_base = OTHER; note = 2'-O-methyl modified nucleotide
  modified_base 90: mod_base = OTHER; note = 2'-O-methyl modified nucleotide
  modified_base 91: mod_base = OTHER; note = 2'-O-methyl modified nucleotide
  modified_base 92: mod_base = OTHER; note = 2'-O-methyl modified nucleotide
  modified_base 93: mod_base = OTHER; note = 2'-O-methyl modified nucleotide
  modified_base 94: mod_base = OTHER; note = 2'-O-methyl modified nucleotide
  modified_base 95: mod_base = OTHER; note = 2'-O-methyl modified nucleotide
  modified_base 96: mod_base = OTHER; note = 2'-O-methyl modified nucleotide
  modified_base 113: mod_base = OTHER; note = Nucleotide with phosphorothioate linkage
  modified_base 114: mod_base = OTHER; note = 2'-O-methyl modified nucleotide with phosphorothioate linkage
  modified_base 115: mod_base = OTHER; note = 2'-O-methyl modified nucleotide with phosphorothioate linkage
  modified_base 116: mod_base = OTHER; note = 2'-O-methyl modified nucleotide
gctggtacacggcagggtcagttttagagctagaaatagcaagttaaaataaggctagtccgttatcaacttgaaaaagtggcaccgagtcggtgcaccctgatagtgccctgccg

SEQ ID NO: 16433 - RNA, 123 nt, synthetic construct
  source 1..123: mol_type = other RNA
  modified_base 1: mod_base = OTHER; note = 2'-O-methyl modified nucleotide with phosphorothioate linkage
  modified_base 2: mod_base = OTHER; note = 2'-O-methyl modified nucleotide with phosphorothioate linkage
  modified_base 3: mod_base = OTHER; note = 2'-O-methyl modified nucleotide with phosphorothioate linkage
  modified_base 29: mod_base = OTHER; note = 2'-O-methyl modified nucleotide
  modified_base 30: mod_base = OTHER; note = 2'-O-methyl modified nucleotide
  modified_base 31: mod_base = OTHER; note = 2'-O-methyl modified nucleotide
  modified_base 32: mod_base = OTHER; note = 2'-O-methyl modified nucleotide
  modified_base 33: mod_base = OTHER; note = 2'-O-methyl modified nucleotide
  modified_base 34: mod_base = OTHER; note = 2'-O-methyl modified nucleotide
  modified_base 35: mod_base = OTHER; note = 2'-O-methyl modified nucleotide
  modified_base 36: mod_base = OTHER; note = 2'-O-methyl modified nucleotide
  modified_base 37: mod_base = OTHER; note = 2'-O-methyl modified nucleotide
  modified_base 38: mod_base = OTHER; note = 2'-O-methyl modified nucleotide
  modified_base 39: mod_base = OTHER; note = 2'-O-methyl modified nucleotide
  modified_base 40: mod_base = OTHER; note = 2'-O-methyl modified nucleotide
  modified_base 69: mod_base = OTHER; note = 2'-O-methyl modified nucleotide
  modified_base 70: mod_base = OTHER; note = 2'-O-methyl modified nucleotide
  modified_base 71: mod_base = OTHER; note = 2'-O-methyl modified nucleotide
  modified_base 72: mod_base = OTHER; note = 2'-O-methyl modified nucleotide
  modified_base 73: mod_base = OTHER; note = 2'-O-methyl modified nucleotide
  modified_base 74: mod_base = OTHER; note = 2'-O-methyl modified nucleotide
  modified_base 75: mod_base = OTHER; note = 2'-O-methyl modified nucleotide
  modified_base 76: mod_base = OTHER; note = 2'-O-methyl modified nucleotide
  modified_base 77: mod_base = OTHER; note = 2'-O-methyl modified nucleotide
  modified_base 78: mod_base = OTHER; note = 2'-O-methyl modified nucleotide
  modified_base 79: mod_base = OTHER; note = 2'-O-methyl modified nucleotide
  modified_base 80: mod_base = OTHER; note = 2'-O-methyl modified nucleotide
  modified_base 81: mod_base = OTHER; note = 2'-O-methyl modified nucleotide
  modified_base 82: mod_base = OTHER; note = 2'-O-methyl modified nucleotide
  modified_base 83: mod_base = OTHER; note = 2'-O-methyl modified nucleotide
  modified_base 84: mod_base = OTHER; note = 2'-O-methyl modified nucleotide
  modified_base 85: mod_base = OTHER; note = 2'-O-methyl modified nucleotide
  modified_base 86: mod_base = OTHER; note = 2'-O-methyl modified nucleotide
  modified_base 87: mod_base = OTHER; note = 2'-O-methyl modified nucleotide
  modified_base 88: mod_base = OTHER; note = 2'-O-methyl modified nucleotide
  modified_base 89: mod_base = OTHER; note = 2'-O-methyl modified nucleotide
  modified_base 90: mod_base = OTHER; note = 2'-O-methyl modified nucleotide
  modified_base 91: mod_base = OTHER; note = 2'-O-methyl modified nucleotide
  modified_base 92: mod_base = OTHER; note = 2'-O-methyl modified nucleotide
  modified_base 93: mod_base = OTHER; note = 2'-O-methyl modified nucleotide
  modified_base 94: mod_base = OTHER; note = 2'-O-methyl modified nucleotide
  modified_base 95: mod_base = OTHER; note = 2'-O-methyl modified nucleotide
  modified_base 96: mod_base = OTHER; note = 2'-O-methyl modified nucleotide
  modified_base 120: mod_base = OTHER; note = Nucleotide with phosphorothioate linkage
  modified_base 121: mod_base = OTHER; note = 2'-O-methyl modified nucleotide with phosphorothioate linkage
  modified_base 122: mod_base = OTHER; note = 2'-O-methyl modified nucleotide with phosphorothioate linkage
  modified_base 123: mod_base = OTHER; note = 2'-O-methyl modified nucleotide
gctggtacacggcagggtcagttttagagctagaaatagcaagttaaaataaggctagtccgttatcaacttgaaaaagtggcaccgagtcggtgcgaaccctgatagtgccctgccgtgtac

SEQ ID NO: 16434 - RNA, 122 nt, synthetic construct
  source 1..122: mol_type = other RNA
  modified_base 1: mod_base = OTHER; note = 2'-O-methyl modified nucleotide with phosphorothioate linkage
  modified_base 2: mod_base = OTHER; note = 2'-O-methyl modified nucleotide with phosphorothioate linkage
  modified_base 3: mod_base = OTHER; note = 2'-O-methyl modified nucleotide with phosphorothioate linkage
  modified_base 29: mod_base = OTHER; note = 2'-O-methyl modified nucleotide
  modified_base 30: mod_base = OTHER; note = 2'-O-methyl modified nucleotide
  modified_base 31: mod_base = OTHER; note = 2'-O-methyl modified nucleotide
  modified_base 32: mod_base = OTHER; note = 2'-O-methyl modified nucleotide
  modified_base 33: mod_base = OTHER; note = 2'-O-methyl modified nucleotide
  modified_base 34: mod_base = OTHER; note = 2'-O-methyl modified nucleotide
  modified_base 35: mod_base = OTHER; note = 2'-O-methyl modified nucleotide
  modified_base 36: mod_base = OTHER; note = 2'-O-methyl modified nucleotide
  modified_base 37: mod_base = OTHER; note = 2'-O-methyl modified nucleotide
  modified_base 38: mod_base = OTHER; note = 2'-O-methyl modified nucleotide
  modified_base 39: mod_base = OTHER; note = 2'-O-methyl modified nucleotide
  modified_base 40: mod_base = OTHER; note = 2'-O-methyl modified nucleotide
  modified_base 69: mod_base = OTHER; note = 2'-O-methyl modified nucleotide
  modified_base 70: mod_base = OTHER; note = 2'-O-methyl modified nucleotide
  modified_base 71: mod_base = OTHER; note = 2'-O-methyl modified nucleotide
  modified_base 72: mod_base = OTHER; note = 2'-O-methyl modified nucleotide
  modified_base 73: mod_base = OTHER; note = 2'-O-methyl modified nucleotide
  modified_base 74: mod_base = OTHER; note = 2'-O-methyl modified nucleotide
  modified_base 75: mod_base = OTHER; note = 2'-O-methyl modified nucleotide
  modified_base 76: mod_base = OTHER; note = 2'-O-methyl modified nucleotide
  modified_base 77: mod_base = OTHER; note = 2'-O-methyl modified nucleotide
  modified_base 78: mod_base = OTHER; note = 2'-O-methyl modified nucleotide
  modified_base 79: mod_base = OTHER; note = 2'-O-methyl modified nucleotide
  modified_base 80: mod_base = OTHER; note = 2'-O-methyl modified nucleotide
  modified_base 81: mod_base = OTHER; note = 2'-O-methyl modified nucleotide
  modified_base 82: mod_base = OTHER; note = 2'-O-methyl modified nucleotide
  modified_base 83: mod_base = OTHER; note = 2'-O-methyl modified nucleotide
  modified_base 84: mod_base = OTHER; note = 2'-O-methyl modified nucleotide
  modified_base 85: mod_base = OTHER; note = 2'-O-methyl modified nucleotide
  modified_base 86: mod_base = OTHER; note = 2'-O-methyl modified nucleotide
  modified_base 87: mod_base = OTHER; note = 2'-O-methyl modified nucleotide
  modified_base 88: mod_base = OTHER; note = 2'-O-methyl modified nucleotide
  modified_base 89: mod_base = OTHER; note = 2'-O-methyl modified nucleotide
  modified_base 90: mod_base = OTHER; note = 2'-O-methyl modified nucleotide
  modified_base 91: mod_base = OTHER; note = 2'-O-methyl modified nucleotide
  modified_base 92: mod_base = OTHER; note = 2'-O-methyl modified nucleotide
  modified_base 93: mod_base = OTHER; note = 2'-O-methyl modified nucleotide
  modified_base 94: mod_base = OTHER; note = 2'-O-methyl modified nucleotide
  modified_base 95: mod_base = OTHER; note = 2'-O-methyl modified nucleotide
  modified_base 96: mod_base = OTHER; note = 2'-O-methyl modified nucleotide
  modified_base 119: mod_base = OTHER; note = Nucleotide with phosphorothioate linkage
  modified_base 120: mod_base = OTHER; note = 2'-O-methyl modified nucleotide with phosphorothioate linkage
  modified_base 121: mod_base = OTHER; note = 2'-O-methyl modified nucleotide with phosphorothioate linkage
  modified_base 122: mod_base = OTHER; note = 2'-O-methyl modified nucleotide
gctggtacacggcagggtcagttttagagctagaaatagcaagttaaaataaggctagtccgttatcaacttgaaaaagtggcaccgagtcggtgcgaaccctgatagtgccctgccgtgta

SEQ ID NO: 16435 - RNA, 121 nt, synthetic construct
  source 1..121: mol_type = other RNA
  modified_base 1: mod_base = OTHER; note = 2'-O-methyl modified nucleotide with phosphorothioate linkage
  modified_base 2: mod_base = OTHER; note = 2'-O-methyl modified nucleotide with phosphorothioate linkage
  modified_base 3: mod_base = OTHER; note = 2'-O-methyl modified nucleotide with phosphorothioate linkage
  modified_base 29: mod_base = OTHER; note = 2'-O-methyl modified nucleotide
  modified_base 30: mod_base = OTHER; note = 2'-O-methyl modified nucleotide
  modified_base 31: mod_base = OTHER; note = 2'-O-methyl modified nucleotide
  modified_base 32: mod_base = OTHER; note = 2'-O-methyl modified nucleotide
  modified_base 33: mod_base = OTHER; note = 2'-O-methyl modified nucleotide
  modified_base 34: mod_base = OTHER; note = 2'-O-methyl modified nucleotide
  modified_base 35: mod_base = OTHER; note = 2'-O-methyl modified nucleotide
  modified_base 36: mod_base = OTHER; note = 2'-O-methyl modified nucleotide
  modified_base 37: mod_base = OTHER; note = 2'-O-methyl modified nucleotide
  modified_base 38: mod_base = OTHER; note = 2'-O-methyl modified nucleotide
  modified_base 39: mod_base = OTHER; note = 2'-O-methyl modified nucleotide
  modified_base 40: mod_base = OTHER; note = 2'-O-methyl modified nucleotide
  modified_base 69: mod_base = OTHER; note = 2'-O-methyl modified nucleotide
  modified_base 70: mod_base = OTHER; note = 2'-O-methyl modified nucleotide
  modified_base 71: mod_base = OTHER; note = 2'-O-methyl modified nucleotide
  modified_base 72: mod_base = OTHER; note = 2'-O-methyl modified nucleotide
  modified_base 73: mod_base = OTHER; note = 2'-O-methyl modified nucleotide
  modified_base 74: mod_base = OTHER; note = 2'-O-methyl modified nucleotide
  modified_base 75: mod_base = OTHER; note = 2'-O-methyl modified nucleotide
  modified_base 76: mod_base = OTHER; note = 2'-O-methyl modified nucleotide
  modified_base 77: mod_base = OTHER; note = 2'-O-methyl modified nucleotide
  modified_base 78: mod_base = OTHER; note = 2'-O-methyl modified nucleotide
  modified_base 79: mod_base = OTHER; note = 2'-O-methyl modified nucleotide
  modified_base 80: mod_base = OTHER; note = 2'-O-methyl modified nucleotide
  modified_base 81: mod_base = OTHER; note = 2'-O-methyl modified nucleotide
  modified_base 82: mod_base = OTHER; note = 2'-O-methyl modified nucleotide
  modified_base 83: mod_base = OTHER; note = 2'-O-methyl modified nucleotide
  modified_base 84: mod_base = OTHER; note = 2'-O-methyl modified nucleotide
  modified_base 85: mod_base = OTHER; note = 2'-O-methyl modified nucleotide
  modified_base 86: mod_base = OTHER; note = 2'-O-methyl modified nucleotide
  modified_base 87: mod_base = OTHER; note = 2'-O-methyl modified nucleotide
  modified_base 88: mod_base = OTHER; note = 2'-O-methyl modified nucleotide
  modified_base 89: mod_base = OTHER; note = 2'-O-methyl modified nucleotide
  modified_base 90: mod_base = OTHER; note = 2'-O-methyl modified nucleotide
  modified_base 91: mod_base = OTHER; note = 2'-O-methyl modified nucleotide
  modified_base 92: mod_base = OTHER; note = 2'-O-methyl modified nucleotide
  modified_base 93: mod_base = OTHER; note = 2'-O-methyl modified nucleotide
  modified_base 94: mod_base = OTHER; note = 2'-O-methyl modified nucleotide
  modified_base 95: mod_base = OTHER; note = 2'-O-methyl modified nucleotide
  modified_base 96: mod_base = OTHER; note = 2'-O-methyl modified nucleotide
  modified_base 118: mod_base = OTHER; note = Nucleotide with phosphorothioate linkage
  modified_base 119: mod_base = OTHER; note = 2'-O-methyl modified nucleotide with phosphorothioate linkage
  modified_base 120: mod_base = OTHER; note = 2'-O-methyl modified nucleotide with phosphorothioate linkage
  modified_base 121: mod_base = OTHER; note = 2'-O-methyl modified nucleotide
gctggtacacggcagggtcagttttagagctagaaatagcaagttaaaataaggctagtccgttatcaacttgaaaaagtggcaccgagtcggtgcgaaccctgatagtgccctgccgtgt

SEQ ID NO: 16436 - RNA, 120 nt, synthetic construct
  source 1..120: mol_type = other RNA
  modified_base 1: mod_base = OTHER; note = 2'-O-methyl modified nucleotide with phosphorothioate linkage
  modified_base 2: mod_base = OTHER; note = 2'-O-methyl modified nucleotide with phosphorothioate linkage
  modified_base 3: mod_base = OTHER; note = 2'-O-methyl modified nucleotide with phosphorothioate linkage
  modified_base 29: mod_base = OTHER; note = 2'-O-methyl modified nucleotide
  modified_base 30: mod_base = OTHER; note = 2'-O-methyl modified nucleotide
  modified_base 31: mod_base = OTHER; note = 2'-O-methyl modified nucleotide
  modified_base 32: mod_base = OTHER; note = 2'-O-methyl modified nucleotide
  modified_base 33: mod_base = OTHER; note = 2'-O-methyl modified nucleotide
  modified_base 34: mod_base = OTHER; note = 2'-O-methyl modified nucleotide
  modified_base 35: mod_base = OTHER; note = 2'-O-methyl modified nucleotide
  modified_base 36: mod_base = OTHER; note = 2'-O-methyl modified nucleotide
  modified_base 37: mod_base = OTHER; note = 2'-O-methyl modified nucleotide
  modified_base 38: mod_base = OTHER; note = 2'-O-methyl modified nucleotide
  modified_base 39: mod_base = OTHER; note = 2'-O-methyl modified nucleotide
  modified_base 40: mod_base = OTHER; note = 2'-O-methyl modified nucleotide
  modified_base 69: mod_base = OTHER; note = 2'-O-methyl modified nucleotide
  modified_base 70: mod_base = OTHER; note = 2'-O-methyl modified nucleotide
  modified_base 71: mod_base = OTHER; note = 2'-O-methyl modified nucleotide
  modified_base 72: mod_base = OTHER; note = 2'-O-methyl modified nucleotide
  modified_base 73: mod_base = OTHER; note = 2'-O-methyl modified nucleotide
  modified_base 74: mod_base = OTHER; note = 2'-O-methyl modified nucleotide
  modified_base 75: mod_base = OTHER; note = 2'-O-methyl modified nucleotide
  modified_base 76: mod_base = OTHER; note = 2'-O-methyl modified nucleotide
  modified_base 77: mod_base = OTHER; note = 2'-O-methyl modified nucleotide
  modified_base 78: mod_base = OTHER; note = 2'-O-methyl modified nucleotide
  modified_base 79: mod_base = OTHER; note = 2'-O-methyl modified nucleotide
  modified_base 80: mod_base = OTHER; note = 2'-O-methyl modified nucleotide
  modified_base 81: mod_base = OTHER; note = 2'-O-methyl modified nucleotide
  modified_base 82: mod_base = OTHER; note = 2'-O-methyl modified nucleotide
  modified_base 83: mod_base = OTHER; note = 2'-O-methyl modified nucleotide
  modified_base 84: mod_base = OTHER; note = 2'-O-methyl modified nucleotide
  modified_base 85: mod_base = OTHER; note = 2'-O-methyl modified nucleotide
  modified_base 86: mod_base = OTHER; note = 2'-O-methyl modified nucleotide
  modified_base 87: mod_base = OTHER; note = 2'-O-methyl modified nucleotide
  modified_base 88: mod_base = OTHER; note = 2'-O-methyl modified nucleotide
  modified_base 89: mod_base = OTHER; note = 2'-O-methyl modified nucleotide
  modified_base 90: mod_base = OTHER; note = 2'-O-methyl modified nucleotide
  modified_base 91: mod_base = OTHER; note = 2'-O-methyl modified nucleotide
  modified_base 92: mod_base = OTHER; note = 2'-O-methyl modified nucleotide
  modified_base 93: mod_base = OTHER; note = 2'-O-methyl modified nucleotide
  modified_base 94: mod_base = OTHER; note = 2'-O-methyl modified nucleotide
  modified_base 95: mod_base = OTHER; note = 2'-O-methyl modified nucleotide
  modified_base 96: mod_base = OTHER; note = 2'-O-methyl modified nucleotide
  modified_base 117: mod_base = OTHER; note = Nucleotide with phosphorothioate linkage
  modified_base 118: mod_base = OTHER; note = 2'-O-methyl modified nucleotide with phosphorothioate linkage
  modified_base 119: mod_base = OTHER; note = 2'-O-methyl modified nucleotide with phosphorothioate linkage
  modified_base 120: mod_base = OTHER; note = 2'-O-methyl modified nucleotide
gctggtacacggcagggtcagttttagagctagaaatagcaagttaaaataaggctagtccgttatcaacttgaaaaagtggcaccgagtcggtgcgaaccctgatagtgccctgccgtg

SEQ ID NO: 16437 - RNA, 119 nt, synthetic construct
  source 1..119: mol_type = other RNA
  modified_base 1: mod_base = OTHER; note = 2'-O-methyl modified nucleotide with phosphorothioate linkage
  modified_base 2: mod_base = OTHER; note = 2'-O-methyl modified nucleotide with phosphorothioate linkage
  modified_base 3: mod_base = OTHER; note = 2'-O-methyl modified nucleotide with phosphorothioate linkage
  modified_base 29: mod_base = OTHER; note = 2'-O-methyl modified nucleotide
  modified_base 30: mod_base = OTHER; note = 2'-O-methyl modified nucleotide
  modified_base 31: mod_base = OTHER; note = 2'-O-methyl modified nucleotide
  modified_base 32: mod_base = OTHER; note = 2'-O-methyl modified nucleotide
  modified_base 33: mod_base = OTHER; note = 2'-O-methyl modified nucleotide
  modified_base 34: mod_base = OTHER; note = 2'-O-methyl modified nucleotide
  modified_base 35: mod_base = OTHER; note = 2'-O-methyl modified nucleotide
  modified_base 36: mod_base = OTHER; note = 2'-O-methyl modified nucleotide
  modified_base 37: mod_base = OTHER; note = 2'-O-methyl modified nucleotide
  modified_base 38: mod_base = OTHER; note = 2'-O-methyl modified nucleotide
  modified_base 39: mod_base = OTHER; note = 2'-O-methyl modified nucleotide
  modified_base 40: mod_base = OTHER; note = 2'-O-methyl modified nucleotide
  modified_base 69: mod_base = OTHER; note = 2'-O-methyl modified nucleotide
  modified_base 70: mod_base = OTHER; note = 2'-O-methyl modified nucleotide
  modified_base 71: mod_base = OTHER; note = 2'-O-methyl modified nucleotide
  modified_base 72: mod_base = OTHER; note = 2'-O-methyl modified nucleotide
  modified_base 73: mod_base = OTHER; note = 2'-O-methyl modified nucleotide
  modified_base 74: mod_base = OTHER; note = 2'-O-methyl modified nucleotide
  modified_base 75: mod_base = OTHER; note = 2'-O-methyl modified nucleotide
  modified_base 76: mod_base = OTHER; note = 2'-O-methyl modified nucleotide
  modified_base 77: mod_base = OTHER; note = 2'-O-methyl modified nucleotide
  modified_base 78: mod_base = OTHER; note = 2'-O-methyl modified nucleotide
  modified_base 79: mod_base = OTHER; note = 2'-O-methyl modified nucleotide
  modified_base 80: mod_base = OTHER; note = 2'-O-methyl modified nucleotide
  modified_base 81: mod_base = OTHER; note = 2'-O-methyl modified nucleotide
  modified_base 82: mod_base = OTHER; note = 2'-O-methyl modified nucleotide
  modified_base 83: mod_base = OTHER; note = 2'-O-methyl modified nucleotide
  modified_base 84: mod_base = OTHER; note = 2'-O-methyl modified nucleotide
  modified_base 85: mod_base = OTHER; note = 2'-O-methyl modified nucleotide
  modified_base 86: mod_base = OTHER; note = 2'-O-methyl modified nucleotide
  modified_base 87: mod_base = OTHER; note = 2'-O-methyl modified nucleotide
  modified_base 88: mod_base = OTHER; note = 2'-O-methyl modified nucleotide
  modified_base 89: mod_base = OTHER; note = 2'-O-methyl modified nucleotide
  modified_base 90: mod_base = OTHER; note = 2'-O-methyl modified nucleotide
  modified_base 91: mod_base = OTHER; note = 2'-O-methyl modified nucleotide
  modified_base 92: mod_base = OTHER; note = 2'-O-methyl modified nucleotide
  modified_base 93: mod_base = OTHER; note = 2'-O-methyl modified nucleotide
  modified_base 94: mod_base = OTHER; note = 2'-O-methyl modified nucleotide
  modified_base 95: mod_base = OTHER; note = 2'-O-methyl modified nucleotide
  modified_base 96: mod_base = OTHER; note = 2'-O-methyl modified nucleotide
  modified_base 116: mod_base = OTHER; note = Nucleotide with phosphorothioate linkage
  modified_base 117: mod_base = OTHER; note = 2'-O-methyl modified nucleotide with phosphorothioate linkage
  modified_base 118: mod_base = OTHER; note = 2'-O-methyl modified nucleotide with phosphorothioate linkage
  modified_base 119: mod_base = OTHER; note = 2'-O-methyl modified nucleotide
gctggtacacggcagggtcagttttagagctagaaatagcaagttaaaataaggctagtccgttatcaacttgaaaaagtggcaccgagtcggtgcgaaccctgatagtgccctgccgt

SEQ ID NO: 16438 - RNA, 118 nt, synthetic construct
  source 1..118: mol_type = other RNA
  modified_base 1: mod_base = OTHER; note = 2'-O-methyl modified nucleotide with phosphorothioate linkage
  modified_base 2: mod_base = OTHER; note = 2'-O-methyl modified nucleotide with phosphorothioate linkage
  modified_base 3: mod_base = OTHER; note = 2'-O-methyl modified nucleotide with phosphorothioate linkage
  modified_base 29: mod_base = OTHER; note = 2'-O-methyl modified nucleotide
  modified_base 30: mod_base = OTHER; note = 2'-O-methyl modified nucleotide
  modified_base 31: mod_base = OTHER; note = 2'-O-methyl modified nucleotide
  modified_base 32: mod_base = OTHER; note = 2'-O-methyl modified nucleotide
  modified_base 33: mod_base = OTHER; note = 2'-O-methyl modified nucleotide
  modified_base 34: mod_base = OTHER; note = 2'-O-methyl modified nucleotide
  modified_base 35: mod_base = OTHER; note = 2'-O-methyl modified nucleotide
  modified_base 36: mod_base = OTHER; note = 2'-O-methyl modified nucleotide
  modified_base 37: mod_base = OTHER; note = 2'-O-methyl modified nucleotide
  modified_base 38: mod_base = OTHER; note = 2'-O-methyl modified nucleotide
  modified_base 39: mod_base = OTHER; note = 2'-O-methyl modified nucleotide
  modified_base 40: mod_base = OTHER; note = 2'-O-methyl modified nucleotide
  modified_base 69: mod_base = OTHER; note = 2'-O-methyl modified nucleotide
  modified_base 70: mod_base = OTHER; note = 2'-O-methyl modified nucleotide
  modified_base 71: mod_base = OTHER; note = 2'-O-methyl modified nucleotide
  modified_base 72: mod_base = OTHER; note = 2'-O-methyl modified nucleotide
  modified_base 73: mod_base = OTHER; note = 2'-O-methyl modified nucleotide
  modified_base 74: mod_base = OTHER; note = 2'-O-methyl modified nucleotide
  modified_base 75: mod_base = OTHER; note = 2'-O-methyl modified nucleotide
  modified_base 76: mod_base = OTHER; note = 2'-O-methyl modified nucleotide
  modified_base 77: mod_base = OTHER; note = 2'-O-methyl modified nucleotide
  modified_base 78: mod_base = OTHER; note = 2'-O-methyl modified nucleotide
  modified_base 79: mod_base = OTHER; note = 2'-O-methyl modified nucleotide
  modified_base 80: mod_base = OTHER; note = 2'-O-methyl modified nucleotide
  modified_base 81: mod_base = OTHER; note = 2'-O-methyl modified nucleotide
  modified_base 82: mod_base = OTHER; note = 2'-O-methyl modified nucleotide
  modified_base 83: mod_base = OTHER; note = 2'-O-methyl modified nucleotide
  modified_base 84: mod_base = OTHER; note = 2'-O-methyl modified nucleotide
  modified_base 85: mod_base = OTHER; note = 2'-O-methyl modified nucleotide
  modified_base 86: mod_base = OTHER; note = 2'-O-methyl modified nucleotide
  modified_base 87: mod_base = OTHER; note = 2'-O-methyl modified nucleotide
  modified_base 88: mod_base = OTHER; note = 2'-O-methyl modified nucleotide
  modified_base 89: mod_base = OTHER; note = 2'-O-methyl modified nucleotide
  modified_base 90: mod_base = OTHER; note = 2'-O-methyl modified nucleotide
  modified_base 91: mod_base = OTHER; note = 2'-O-methyl modified nucleotide
  modified_base 92: mod_base = OTHER; note = 2'-O-methyl modified nucleotide
  modified_base 93: mod_base = OTHER; note = 2'-O-methyl modified nucleotide
  modified_base 94: mod_base = OTHER; note = 2'-O-methyl modified nucleotide
  modified_base 95: mod_base = OTHER; note = 2'-O-methyl modified nucleotide
  modified_base 96: mod_base = OTHER; note = 2'-O-methyl modified nucleotide
  modified_base 115: mod_base = OTHER; note = Nucleotide with phosphorothioate linkage
  modified_base 116: mod_base = OTHER; note = 2'-O-methyl modified nucleotide with phosphorothioate linkage
  modified_base 117: mod_base = OTHER; note = 2'-O-methyl modified nucleotide with phosphorothioate linkage
  modified_base 118: mod_base = OTHER; note = 2'-O-methyl modified nucleotide
gctggtacacggcagggtcagttttagagctagaaatagcaagttaaaataaggctagtccgttatcaacttgaaaaagtggcaccgagtcggtgcgaaccctgatagtgccctgccg

SEQ ID NO: 16439 - RNA, 125 nt, synthetic construct
  source 1..125: mol_type = other RNA
  modified_base 1: mod_base = OTHER; note = 2'-O-methyl modified nucleotide with phosphorothioate linkage
  modified_base 2: mod_base = OTHER; note = 2'-O-methyl modified nucleotide with phosphorothioate linkage
  modified_base 3: mod_base = OTHER; note = 2'-O-methyl modified nucleotide with phosphorothioate linkage
  modified_base 29: mod_base = OTHER; note = 2'-O-methyl modified nucleotide
  modified_base 30: mod_base = OTHER; note = 2'-O-methyl modified nucleotide
  modified_base 31: mod_base = OTHER; note = 2'-O-methyl modified nucleotide
  modified_base 32: mod_base = OTHER; note = 2'-O-methyl modified nucleotide
  modified_base 33: mod_base = OTHER; note = 2'-O-methyl modified nucleotide
  modified_base 34: mod_base = OTHER; note = 2'-O-methyl modified nucleotide
  modified_base 35: mod_base = OTHER; note = 2'-O-methyl modified nucleotide
  modified_base 36: mod_base = OTHER; note = 2'-O-methyl modified nucleotide
  modified_base 37: mod_base = OTHER; note = 2'-O-methyl modified nucleotide
  modified_base 38: mod_base = OTHER; note = 2'-O-methyl modified nucleotide
  modified_base 39: mod_base = OTHER; note = 2'-O-methyl modified nucleotide
  modified_base 40: mod_base = OTHER; note = 2'-O-methyl modified nucleotide
  modified_base 69: mod_base = OTHER; note = 2'-O-methyl modified nucleotide
  modified_base 70: mod_base = OTHER; note = 2'-O-methyl modified nucleotide
  modified_base 71: mod_base = OTHER; note = 2'-O-methyl modified nucleotide
  modified_base 72: mod_base = OTHER; note = 2'-O-methyl modified nucleotide
  modified_base 73: mod_base = OTHER; note = 2'-O-methyl modified nucleotide
  modified_base 74: mod_base = OTHER; note = 2'-O-methyl modified nucleotide
  modified_base 75: mod_base = OTHER; note = 2'-O-methyl modified nucleotide
  modified_base 76: mod_base = OTHER; note = 2'-O-methyl modified nucleotide
  modified_base 77: mod_base = OTHER; note = 2'-O-methyl modified nucleotide
  modified_base 78: mod_base = OTHER; note = 2'-O-methyl modified nucleotide
  modified_base 79: mod_base = OTHER; note = 2'-O-methyl modified nucleotide
  modified_base 80: mod_base = OTHER; note = 2'-O-methyl modified nucleotide
  modified_base 81: mod_base = OTHER; note = 2'-O-methyl modified nucleotide
  modified_base 82: mod_base = OTHER; note = 2'-O-methyl modified nucleotide
  modified_base 83: mod_base = OTHER; note = 2'-O-methyl modified nucleotide
  modified_base 84: mod_base = OTHER; note = 2'-O-methyl modified nucleotide
  modified_base 85: mod_base = OTHER; note = 2'-O-methyl modified nucleotide
  modified_base 86: mod_base = OTHER; note = 2'-O-methyl modified nucleotide
  modified_base 87: mod_base = OTHER; note = 2'-O-methyl modified nucleotide
  modified_base 88: mod_base = OTHER; note = 2'-O-methyl modified nucleotide
  modified_base 89: mod_base = OTHER; note = 2'-O-methyl modified nucleotide
  modified_base 90: mod_base = OTHER; note = 2'-O-methyl modified nucleotide
  modified_base 91: mod_base = OTHER; note = 2'-O-methyl modified nucleotide
  modified_base 92: mod_base = OTHER; note = 2'-O-methyl modified nucleotide
  modified_base 93: mod_base = OTHER; note = 2'-O-methyl modified nucleotide
  modified_base 94: mod_base = OTHER; note = 2'-O-methyl modified nucleotide
  modified_base 95: mod_base = OTHER; note = 2'-O-methyl modified nucleotide
  modified_base 96: mod_base = OTHER; note = 2'-O-methyl modified nucleotide
  modified_base 122: mod_base = OTHER; note = Nucleotide with phosphorothioate linkage
  modified_base 123: mod_base = OTHER; note = 2'-O-methyl modified nucleotide with phosphorothioate linkage
  modified_base 124: mod_base = OTHER; note = 2'-O-methyl modified nucleotide with phosphorothioate linkage
  modified_base 125: mod_base = OTHER; note = 2'-O-methyl modified nucleotide
gctggtacacggcagggtcagttttagagctagaaatagcaagttaaaataaggctagtccgttatcaacttgaaaaagtggcaccgagtcggtgccagaaccctgatagtgccctgccgtgtac

SEQ ID NO: 16440 - RNA, 124 nt, synthetic construct
  source 1..124: mol_type = other RNA
  modified_base 1: mod_base = OTHER; note = 2'-O-methyl modified nucleotide with phosphorothioate linkage
  modified_base 2: mod_base = OTHER; note = 2'-O-methyl modified nucleotide with phosphorothioate linkage
  modified_base 3: mod_base = OTHER; note = 2'-O-methyl modified nucleotide with phosphorothioate linkage
  modified_base 29: mod_base = OTHER; note = 2'-O-methyl modified nucleotide
  modified_base 30: mod_base = OTHER; note = 2'-O-methyl modified nucleotide
  modified_base 31: mod_base = OTHER; note = 2'-O-methyl modified nucleotide
  modified_base 32: mod_base = OTHER; note = 2'-O-methyl modified nucleotide
  modified_base 33: mod_base = OTHER; note = 2'-O-methyl modified nucleotide
  modified_base 34: mod_base = OTHER; note = 2'-O-methyl modified nucleotide
  modified_base 35: mod_base = OTHER; note = 2'-O-methyl modified nucleotide
  modified_base 36: mod_base = OTHER; note = 2'-O-methyl modified nucleotide
  modified_base 37: mod_base = OTHER; note = 2'-O-methyl modified nucleotide
  modified_base 38: mod_base = OTHER; note = 2'-O-methyl modified nucleotide
  modified_base 39: mod_base = OTHER; note = 2'-O-methyl modified nucleotide
  modified_base 40: mod_base = OTHER; note = 2'-O-methyl modified nucleotide
  modified_base 69: mod_base = OTHER; note = 2'-O-methyl modified nucleotide
  modified_base 70: mod_base = OTHER; note = 2'-O-methyl modified nucleotide
  modified_base 71: mod_base = OTHER; note = 2'-O-methyl modified nucleotide
  modified_base 72: mod_base = OTHER; note = 2'-O-methyl modified nucleotide
  modified_base 73: mod_base = OTHER; note = 2'-O-methyl modified nucleotide
  modified_base 74: mod_base = OTHER; note = 2'-O-methyl modified nucleotide
  modified_base 75: mod_base = OTHER; note = 2'-O-methyl modified nucleotide
  modified_base 76: mod_base = OTHER; note = 2'-O-methyl modified nucleotide
  modified_base 77: mod_base = OTHER; note = 2'-O-methyl modified nucleotide
  modified_base 78: mod_base = OTHER; note = 2'-O-methyl modified nucleotide
  modified_base 79: mod_base = OTHER; note = 2'-O-methyl modified nucleotide
  modified_base 80: mod_base = OTHER; note = 2'-O-methyl modified nucleotide
  modified_base 81: mod_base = OTHER; note = 2'-O-methyl modified nucleotide
  modified_base 82: mod_base = OTHER; note = 2'-O-methyl modified nucleotide
  modified_base 83: mod_base = OTHER; note = 2'-O-methyl modified nucleotide
  modified_base 84: mod_base = OTHER; note = 2'-O-methyl modified nucleotide
  modified_base 85: mod_base = OTHER; note = 2'-O-methyl modified nucleotide
  modified_base 86: mod_base = OTHER; note = 2'-O-methyl modified nucleotide
  modified_base 87: mod_base = OTHER; note = 2'-O-methyl modified nucleotide
  modified_base 88: mod_base = OTHER; note = 2'-O-methyl modified nucleotide
  modified_base 89: mod_base = OTHER; note = 2'-O-methyl modified nucleotide
  modified_base 90: mod_base = OTHER; note = 2'-O-methyl modified nucleotide
  modified_base 91: mod_base = OTHER; note = 2'-O-methyl modified nucleotide
  modified_base 92: mod_base = OTHER; note = 2'-O-methyl modified nucleotide
  modified_base 93: mod_base = OTHER; note = 2'-O-methyl modified nucleotide
  modified_base 94: mod_base = OTHER; note = 2'-O-methyl modified nucleotide
  modified_base 95: mod_base = OTHER; note = 2'-O-methyl modified nucleotide
  modified_base 96: mod_base = OTHER; note = 2'-O-methyl modified nucleotide
  modified_base 121: mod_base = OTHER; note = Nucleotide with phosphorothioate linkage
  modified_base 122: mod_base = OTHER; note = 2'-O-methyl modified nucleotide with phosphorothioate linkage
  modified_base 123: mod_base = OTHER; note = 2'-O-methyl modified nucleotide with phosphorothioate linkage
  modified_base 124: mod_base = OTHER; note = 2'-O-methyl modified nucleotide
gctggtacacggcagggtcagttttagagctagaaatagcaagttaaaataaggctagtccgttatcaacttgaaaaagtggcaccgagtcggtgccagaaccctgatagtgccctgccgtgta

SEQ ID NO: 16441 - RNA, 123 nt, synthetic construct
  source 1..123: mol_type = other RNA
  modified_base 1: mod_base = OTHER; note = 2'-O-methyl modified nucleotide with phosphorothioate linkage
  modified_base 2: mod_base = OTHER; note = 2'-O-methyl modified nucleotide with phosphorothioate linkage
  modified_base 3: mod_base = OTHER; note = 2'-O-methyl modified nucleotide with phosphorothioate linkage
  modified_base 29: mod_base = OTHER; note = 2'-O-methyl modified nucleotide
  modified_base 30: mod_base = OTHER; note = 2'-O-methyl modified nucleotide
  modified_base 31: mod_base = OTHER; note = 2'-O-methyl modified nucleotide
  modified_base 32: mod_base = OTHER; note = 2'-O-methyl modified nucleotide
  modified_base 33: mod_base = OTHER; note = 2'-O-methyl modified nucleotide
  modified_base 34: mod_base = OTHER; note = 2'-O-methyl modified nucleotide
  modified_base 35: mod_base = OTHER; note = 2'-O-methyl modified nucleotide
  modified_base 36: mod_base = OTHER; note = 2'-O-methyl modified nucleotide
  modified_base 37: mod_base = OTHER; note = 2'-O-methyl modified nucleotide
  modified_base 38: mod_base = OTHER; note = 2'-O-methyl modified nucleotide
  modified_base 39: mod_base = OTHER; note = 2'-O-methyl modified nucleotide
  modified_base 40: mod_base = OTHER; note = 2'-O-methyl modified nucleotide
  modified_base 69: mod_base = OTHER; note = 2'-O-methyl modified nucleotide
  modified_base 70: mod_base = OTHER; note = 2'-O-methyl modified nucleotide
  modified_base 71: mod_base = OTHER; note = 2'-O-methyl modified nucleotide
  modified_base 72: mod_base = OTHER; note = 2'-O-methyl modified nucleotide
  modified_base 73: mod_base = OTHER; note = 2'-O-methyl modified nucleotide
  modified_base 74: mod_base = OTHER; note = 2'-O-methyl modified nucleotide
  modified_base 75: mod_base = OTHER; note = 2'-O-methyl modified nucleotide
  modified_base 76: mod_base = OTHER; note = 2'-O-methyl modified nucleotide
  modified_base 77: mod_base = OTHER; note = 2'-O-methyl modified nucleotide
  modified_base 78: mod_base = OTHER; note = 2'-O-methyl modified nucleotide
  modified_base 79: mod_base = OTHER; note = 2'-O-methyl modified nucleotide
  modified_base 80: mod_base = OTHER; note = 2'-O-methyl modified nucleotide
  modified_base 81: mod_base = OTHER; note = 2'-O-methyl modified nucleotide
  modified_base 82: mod_base = OTHER; note = 2'-O-methyl modified nucleotide
  modified_base 83: mod_base = OTHER; note = 2'-O-methyl modified nucleotide
  modified_base 84: mod_base = OTHER; note = 2'-O-methyl modified nucleotide
  modified_base 85: mod_base = OTHER; note = 2'-O-methyl modified nucleotide
  modified_base 86: mod_base = OTHER; note = 2'-O-methyl modified nucleotide
  modified_base 87: mod_base = OTHER; note = 2'-O-methyl modified nucleotide
  modified_base 88: mod_base = OTHER; note = 2'-O-methyl modified nucleotide
  modified_base 89: mod_base = OTHER; note = 2'-O-methyl modified nucleotide
  modified_base 90: mod_base = OTHER; note = 2'-O-methyl modified nucleotide
  modified_base 91: mod_base = OTHER; note = 2'-O-methyl modified nucleotide
  modified_base 92: mod_base = OTHER; note = 2'-O-methyl modified nucleotide
  modified_base 93: mod_base = OTHER; note = 2'-O-methyl modified nucleotide
  modified_base 94: mod_base = OTHER; note = 2'-O-methyl modified nucleotide
  modified_base 95: mod_base = OTHER; note = 2'-O-methyl modified nucleotide
  modified_base 96: mod_base = OTHER; note = 2'-O-methyl modified nucleotide
  modified_base 120: mod_base = OTHER; note = Nucleotide with phosphorothioate linkage
  modified_base 121: mod_base = OTHER; note = 2'-O-methyl modified nucleotide with phosphorothioate linkage
  modified_base 122: mod_base = OTHER; note = 2'-O-methyl modified nucleotide with phosphorothioate linkage
  modified_base 123: mod_base = OTHER; note = 2'-O-methyl modified nucleotide
gctggtacacggcagggtcagttttagagctagaaatagcaagttaaaataaggctagtccgttatcaacttgaaaaagtggcaccgagtcggtgccagaaccctgatagtgccctgccgtgt

SEQ ID NO: 16442 - RNA, 122 nt, synthetic construct
  source 1..122: mol_type = other RNA
  modified_base 1: mod_base = OTHER; note = 2'-O-methyl modified nucleotide with phosphorothioate linkage
  modified_base 2: mod_base = OTHER; note = 2'-O-methyl modified nucleotide with phosphorothioate linkage
  modified_base 3: mod_base = OTHER; note = 2'-O-methyl modified nucleotide with phosphorothioate linkage
  modified_base 29: mod_base = OTHER; note = 2'-O-methyl modified nucleotide
  modified_base 30: mod_base = OTHER; note = 2'-O-methyl modified nucleotide
  modified_base 31: mod_base = OTHER; note = 2'-O-methyl modified nucleotide
  modified_base 32: mod_base = OTHER; note = 2'-O-methyl modified nucleotide
  modified_base 33: mod_base = OTHER; note = 2'-O-methyl modified nucleotide
  modified_base 34: mod_base = OTHER; note = 2'-O-methyl modified nucleotide
  modified_base 35: mod_base = OTHER; note = 2'-O-methyl modified nucleotide
  modified_base 36: mod_base = OTHER; note = 2'-O-methyl modified nucleotide
  modified_base 37: mod_base = OTHER; note = 2'-O-methyl modified nucleotide
  modified_base 38: mod_base = OTHER; note = 2'-O-methyl modified nucleotide
  modified_base 39: mod_base = OTHER; note = 2'-O-methyl modified nucleotide
  modified_base 40: mod_base = OTHER; note = 2'-O-methyl modified nucleotide
  modified_base 69: mod_base = OTHER; note = 2'-O-methyl modified nucleotide
  modified_base 70: mod_base = OTHER; note = 2'-O-methyl modified nucleotide
  modified_base 71: mod_base = OTHER; note = 2'-O-methyl modified nucleotide
  modified_base 72: mod_base = OTHER; note = 2'-O-methyl modified nucleotide
  modified_base 73: mod_base = OTHER; note = 2'-O-methyl modified nucleotide
  modified_base 74: mod_base = OTHER; note = 2'-O-methyl modified nucleotide
  modified_base 75: mod_base = OTHER; note = 2'-O-methyl modified nucleotide
  modified_base 76: mod_base = OTHER; note = 2'-O-methyl modified nucleotide
  modified_base 77: mod_base = OTHER; note = 2'-O-methyl modified nucleotide
  modified_base 78: mod_base = OTHER; note = 2'-O-methyl modified nucleotide
  modified_base 79: mod_base = OTHER; note = 2'-O-methyl modified nucleotide
  modified_base 80: mod_base = OTHER; note = 2'-O-methyl modified nucleotide
  modified_base 81: mod_base = OTHER; note = 2'-O-methyl modified nucleotide
  modified_base 82: mod_base = OTHER; note = 2'-O-methyl modified nucleotide
  modified_base 83: mod_base = OTHER; note = 2'-O-methyl modified nucleotide
  modified_base 84: mod_base = OTHER; note = 2'-O-methyl modified nucleotide
  modified_base 85: mod_base = OTHER; note = 2'-O-methyl modified nucleotide
  modified_base 86: mod_base = OTHER; note = 2'-O-methyl modified nucleotide
  modified_base 87: mod_base = OTHER; note = 2'-O-methyl modified nucleotide
  modified_base 88: mod_base = OTHER; note = 2'-O-methyl modified nucleotide
  modified_base 89: mod_base = OTHER; note = 2'-O-methyl modified nucleotide
  modified_base 90: mod_base = OTHER; note = 2'-O-methyl modified nucleotide
  modified_base 91: mod_base = OTHER; note = 2'-O-methyl modified nucleotide
  modified_base 92: mod_base = OTHER; note = 2'-O-methyl modified nucleotide
  modified_base 93: mod_base = OTHER; note = 2'-O-methyl modified nucleotide
  modified_base 94: mod_base = OTHER; note = 2'-O-methyl modified nucleotide
  modified_base 95: mod_base = OTHER; note = 2'-O-methyl modified nucleotide
  modified_base 96: mod_base = OTHER; note = 2'-O-methyl modified nucleotide
  modified_base 119: mod_base = OTHER; note = Nucleotide with phosphorothioate linkage
  modified_base 120: mod_base = OTHER; note = 2'-O-methyl modified nucleotide with phosphorothioate linkage
  modified_base 121: mod_base = OTHER; note = 2'-O-methyl modified nucleotide with phosphorothioate linkage
  modified_base 122: mod_base = OTHER; note = 2'-O-methyl modified nucleotide
gctggtacacggcagggtcagttttagagctagaaatagcaagttaaaataaggctagtccgttatcaacttgaaaaagtggcaccgagtcggtgccagaaccctgatagtgccctgccgtg

SEQ ID NO: 16443 - RNA, 121 nt, synthetic construct
  source 1..121: mol_type = other RNA
  modified_base 1: mod_base = OTHER; note = 2'-O-methyl modified nucleotide with phosphorothioate linkage
  modified_base 2: mod_base = OTHER; note = 2'-O-methyl modified nucleotide with phosphorothioate linkage
  modified_base 3: mod_base = OTHER; note = 2'-O-methyl modified nucleotide with phosphorothioate linkage
  modified_base 29: mod_base = OTHER; note = 2'-O-methyl modified nucleotide
  modified_base 30: mod_base = OTHER; note = 2'-O-methyl modified nucleotide
  modified_base 31: mod_base = OTHER; note = 2'-O-methyl modified nucleotide
  modified_base 32: mod_base = OTHER; note = 2'-O-methyl modified nucleotide
  modified_base 33: mod_base = OTHER; note = 2'-O-methyl modified nucleotide
  modified_base 34: mod_base = OTHER; note = 2'-O-methyl modified nucleotide
  modified_base 35: mod_base = OTHER; note = 2'-O-methyl modified nucleotide
  modified_base 36: mod_base = OTHER; note = 2'-O-methyl modified nucleotide
  modified_base 37: mod_base = OTHER; note = 2'-O-methyl modified nucleotide
  modified_base 38: mod_base = OTHER; note = 2'-O-methyl modified nucleotide
  modified_base 39: mod_base = OTHER; note = 2'-O-methyl modified nucleotide
  modified_base 40: mod_base = OTHER; note = 2'-O-methyl modified nucleotide
  modified_base 69: mod_base = OTHER; note = 2'-O-methyl modified nucleotide
  modified_base 70: mod_base = OTHER; note = 2'-O-methyl modified nucleotide
  modified_base 71: mod_base = OTHER; note = 2'-O-methyl modified nucleotide
  modified_base 72: mod_base = OTHER; note = 2'-O-methyl modified nucleotide
  modified_base 73: mod_base = OTHER; note = 2'-O-methyl modified nucleotide
  modified_base 74: mod_base = OTHER; note = 2'-O-methyl modified nucleotide
  modified_base 75: mod_base = OTHER; note = 2'-O-methyl modified nucleotide
  modified_base 76: mod_base = OTHER; note = 2'-O-methyl modified nucleotide
  modified_base 77: mod_base = OTHER; note = 2'-O-methyl modified nucleotide
  modified_base 78: mod_base = OTHER; note = 2'-O-methyl modified nucleotide
  modified_base 79: mod_base = OTHER; note = 2'-O-methyl modified nucleotide
  modified_base 80: mod_base = OTHER; note = 2'-O-methyl modified nucleotide
  modified_base 81: mod_base = OTHER; note = 2'-O-methyl modified nucleotide
  modified_base 82: mod_base = OTHER; note = 2'-O-methyl modified nucleotide
  modified_base 83: mod_base = OTHER; note = 2'-O-methyl modified nucleotide
  modified_base 84: mod_base = OTHER; note = 2'-O-methyl modified nucleotide
  modified_base 85: mod_base = OTHER; note = 2'-O-methyl modified nucleotide
  modified_base 86: mod_base = OTHER; note = 2'-O-methyl modified nucleotide
  modified_base 87: mod_base = OTHER; note = 2'-O-methyl modified nucleotide
  modified_base 88: mod_base = OTHER; note = 2'-O-methyl modified nucleotide
  modified_base 89: mod_base = OTHER; note = 2'-O-methyl modified nucleotide
  modified_base 90: mod_base = OTHER; note = 2'-O-methyl modified nucleotide
  modified_base 91: mod_base = OTHER; note = 2'-O-methyl modified nucleotide
  modified_base 92: mod_base = OTHER; note = 2'-O-methyl modified nucleotide
  modified_base 93: mod_base = OTHER; note = 2'-O-methyl modified nucleotide
  modified_base 94: mod_base = OTHER; note = 2'-O-methyl modified nucleotide
  modified_base 95: mod_base = OTHER; note = 2'-O-methyl modified nucleotide
  modified_base 96: mod_base = OTHER; note = 2'-O-methyl modified nucleotide
  modified_base 118: mod_base = OTHER; note = Nucleotide with phosphorothioate linkage
  modified_base 119: mod_base = OTHER; note = 2'-O-methyl modified nucleotide with phosphorothioate linkage
  modified_base 120: mod_base = OTHER; note = 2'-O-methyl modified nucleotide with phosphorothioate linkage
  modified_base 121: mod_base = OTHER; note = 2'-O-methyl modified nucleotide
gctggtacacggcagggtcagttttagagctagaaatagcaagttaaaataaggctagtccgttatcaacttgaaaaagtggcaccgagtcggtgccagaaccctgatagtgccctgccgt

SEQ ID NO: 16444 - RNA, 120 nt, synthetic construct
  source 1..120: mol_type = other RNA
  modified_base 1: mod_base = OTHER; note = 2'-O-methyl modified nucleotide with phosphorothioate linkage
  modified_base 2: mod_base = OTHER; note = 2'-O-methyl modified nucleotide with phosphorothioate linkage
  modified_base 3: mod_base = OTHER; note = 2'-O-methyl modified nucleotide with phosphorothioate linkage
  modified_base 29: mod_base = OTHER; note = 2'-O-methyl modified nucleotide
  modified_base 30: mod_base = OTHER; note = 2'-O-methyl modified nucleotide
  modified_base 31: mod_base = OTHER; note = 2'-O-methyl modified nucleotide
  modified_base 32: mod_base = OTHER; note = 2'-O-methyl modified nucleotide
  modified_base 33: mod_base = OTHER; note = 2'-O-methyl modified nucleotide
  modified_base 34: mod_base = OTHER; note = 2'-O-methyl modified nucleotide
  modified_base 35: mod_base = OTHER; note = 2'-O-methyl modified nucleotide
  modified_base 36: mod_base = OTHER; note = 2'-O-methyl modified nucleotide
  modified_base 37: mod_base = OTHER; note = 2'-O-methyl modified nucleotide
  modified_base 38: mod_base = OTHER; note = 2'-O-methyl modified nucleotide
  modified_base 39: mod_base = OTHER; note = 2'-O-methyl modified nucleotide
  modified_base 40: mod_base = OTHER; note = 2'-O-methyl modified nucleotide
  modified_base 69: mod_base = OTHER; note = 2'-O-methyl modified nucleotide
  modified_base 70: mod_base = OTHER; note = 2'-O-methyl modified nucleotide
  modified_base 71: mod_base = OTHER; note = 2'-O-methyl modified nucleotide
  modified_base 72: mod_base = OTHER; note = 2'-O-methyl modified nucleotide
  modified_base 73: mod_base = OTHER; note = 2'-O-methyl modified nucleotide
  modified_base 74: mod_base = OTHER; note = 2'-O-methyl modified nucleotide
  modified_base 75: mod_base = OTHER; note = 2'-O-methyl modified nucleotide
  modified_base 76: mod_base = OTHER; note = 2'-O-methyl modified nucleotide
  modified_base 77: mod_base = OTHER; note = 2'-O-methyl modified nucleotide
  modified_base 78: mod_base = OTHER; note = 2'-O-methyl modified nucleotide
  modified_base 79: mod_base = OTHER; note = 2'-O-methyl modified nucleotide
  modified_base 80: mod_base = OTHER; note = 2'-O-methyl modified nucleotide
  modified_base 81: mod_base = OTHER; note = 2'-O-methyl modified nucleotide
  modified_base 82: mod_base = OTHER; note = 2'-O-methyl modified nucleotide
  modified_base 83: mod_base = OTHER; note = 2'-O-methyl modified nucleotide
  modified_base 84: mod_base = OTHER; note = 2'-O-methyl modified nucleotide
  modified_base 85: mod_base = OTHER; note = 2'-O-methyl modified nucleotide
  modified_base 86: mod_base = OTHER; note = 2'-O-methyl modified nucleotide
  modified_base 87: mod_base = OTHER; note = 2'-O-methyl modified nucleotide
  modified_base 88: mod_base = OTHER; note = 2'-O-methyl modified nucleotide
  modified_base 89: mod_base = OTHER; note = 2'-O-methyl modified nucleotide
  modified_base 90: mod_base = OTHER; note = 2'-O-methyl modified nucleotide
  modified_base 91: mod_base = OTHER; note = 2'-O-methyl modified nucleotide
  modified_base 92: mod_base = OTHER; note = 2'-O-methyl modified nucleotide
  modified_base 93: mod_base = OTHER; note = 2'-O-methyl modified nucleotide
  modified_base 94: mod_base = OTHER; note = 2'-O-methyl modified nucleotide
  modified_base 95: mod_base = OTHER; note = 2'-O-methyl modified nucleotide
  modified_base 96: mod_base = OTHER; note = 2'-O-methyl modified nucleotide
  modified_base 117: mod_base = OTHER; note = Nucleotide with phosphorothioate linkage
  modified_base 118: mod_base = OTHER; note = 2'-O-methyl modified nucleotide with phosphorothioate linkage
  modified_base 119: mod_base = OTHER; note = 2'-O-methyl modified nucleotide with phosphorothioate linkage
  modified_base 120: mod_base = OTHER; note = 2'-O-methyl modified nucleotide
gctggtacacggcagggtcagttttagagctagaaatagcaagttaaaataaggctagtccgttatcaacttgaaaaagtggcaccgagtcggtgccagaaccctgatagtgccctgccg

SEQ ID NO: 16445 - RNA, 127 nt, synthetic construct
  source 1..127: mol_type = other RNA
  modified_base 1: mod_base = OTHER; note = 2'-O-methyl modified nucleotide with phosphorothioate linkage
  modified_base 2: mod_base = OTHER; note = 2'-O-methyl modified nucleotide with phosphorothioate linkage
  modified_base 3: mod_base = OTHER; note = 2'-O-methyl modified nucleotide with phosphorothioate linkage
  modified_base 29: mod_base = OTHER; note = 2'-O-methyl modified nucleotide
  modified_base 30: mod_base = OTHER; note = 2'-O-methyl modified nucleotide
  modified_base 31: mod_base = OTHER; note = 2'-O-methyl modified nucleotide
  modified_base 32: mod_base = OTHER; note = 2'-O-methyl modified nucleotide
  modified_base 33: mod_base = OTHER; note = 2'-O-methyl modified nucleotide
  modified_base 34: mod_base = OTHER; note = 2'-O-methyl modified nucleotide
  modified_base 35: mod_base = OTHER; note = 2'-O-methyl modified nucleotide
  modified_base 36: mod_base = OTHER; note = 2'-O-methyl modified nucleotide
  modified_base 37: mod_base = OTHER; note = 2'-O-methyl modified nucleotide
  modified_base 38: mod_base = OTHER; note = 2'-O-methyl modified nucleotide
  modified_base 39: mod_base = OTHER; note = 2'-O-methyl modified nucleotide
  modified_base 40: mod_base = OTHER; note = 2'-O-methyl modified nucleotide
  modified_base 69: mod_base = OTHER; note = 2'-O-methyl modified nucleotide
  modified_base 70: mod_base = OTHER; note = 2'-O-methyl modified nucleotide
  modified_base 71: mod_base = OTHER; note = 2'-O-methyl modified nucleotide
  modified_base 72: mod_base = OTHER; note = 2'-O-methyl modified nucleotide
  modified_base 73: mod_base = OTHER; note = 2'-O-methyl modified nucleotide
  modified_base 74: mod_base = OTHER; note = 2'-O-methyl modified nucleotide
  modified_base 75: mod_base = OTHER; note = 2'-O-methyl modified nucleotide
  modified_base 76: mod_base = OTHER; note = 2'-O-methyl modified nucleotide
  modified_base 77: mod_base = OTHER; note = 2'-O-methyl modified nucleotide
  modified_base 78: mod_base = OTHER; note = 2'-O-methyl modified nucleotide
  modified_base 79: mod_base = OTHER; note = 2'-O-methyl modified nucleotide
  modified_base 80: mod_base = OTHER; note = 2'-O-methyl modified nucleotide
  modified_base 81: mod_base = OTHER; note = 2'-O-methyl modified nucleotide
  modified_base 82: mod_base = OTHER; note = 2'-O-methyl modified nucleotide
  modified_base 83: mod_base = OTHER; note = 2'-O-methyl modified nucleotide
  modified_base 84: mod_base = OTHER; note = 2'-O-methyl modified nucleotide
  modified_base 85: mod_base = OTHER; note = 2'-O-methyl modified nucleotide
  modified_base 86: mod_base = OTHER; note = 2'-O-methyl modified nucleotide
  modified_base 87: mod_base = OTHER; note = 2'-O-methyl modified nucleotide
  modified_base 88: mod_base = OTHER; note = 2'-O-methyl modified nucleotide
  modified_base 89: mod_base = OTHER; note = 2'-O-methyl modified nucleotide
  modified_base 90: mod_base = OTHER; note = 2'-O-methyl modified nucleotide
  modified_base 91: mod_base = OTHER; note = 2'-O-methyl modified nucleotide
  modified_base 92: mod_base = OTHER; note = 2'-O-methyl modified nucleotide
  modified_base 93: mod_base = OTHER; note = 2'-O-methyl modified nucleotide
  modified_base 94: mod_base = OTHER; note = 2'-O-methyl modified nucleotide
  modified_base 95: mod_base = OTHER; note = 2'-O-methyl modified nucleotide
  modified_base 96: mod_base = OTHER; note = 2'-O-methyl modified nucleotide
  modified_base 124: mod_base = OTHER; note = Nucleotide with phosphorothioate linkage
  modified_base 125: mod_base = OTHER; note = 2'-O-methyl modified nucleotide with phosphorothioate linkage
  modified_base 126: mod_base = OTHER; note = 2'-O-methyl modified nucleotide with phosphorothioate linkage
  modified_base 127: mod_base = OTHER; note = 2'-O-methyl modified nucleotide
gctggtacacggcagggtcagttttagagctagaaatagcaagttaaaataaggctagtccgttatcaacttgaaaaagtggcaccgagtcggtgctccagaaccctgatagtgccctgccgtgtac

SEQ ID NO: 16446 - RNA, 126 nt, synthetic construct
  source 1..126: mol_type = other RNA
  modified_base 1: mod_base = OTHER; note = 2'-O-methyl modified nucleotide with phosphorothioate linkage
  modified_base 2: mod_base = OTHER; note = 2'-O-methyl modified nucleotide with phosphorothioate linkage
  modified_base 3: mod_base = OTHER; note = 2'-O-methyl modified nucleotide with phosphorothioate linkage
  modified_base 29: mod_base = OTHER; note = 2'-O-methyl modified nucleotide
  modified_base 30: mod_base = OTHER; note = 2'-O-methyl modified nucleotide
  modified_base 31: mod_base = OTHER; note = 2'-O-methyl modified nucleotide
  modified_base 32: mod_base = OTHER; note = 2'-O-methyl modified nucleotide
  modified_base 33: mod_base = OTHER; note = 2'-O-methyl modified nucleotide
  modified_base 34: mod_base = OTHER; note = 2'-O-methyl modified nucleotide
  modified_base 35: mod_base = OTHER; note = 2'-O-methyl modified nucleotide
  modified_base 36: mod_base = OTHER; note = 2'-O-methyl modified nucleotide
  modified_base 37: mod_base = OTHER; note = 2'-O-methyl modified nucleotide
  modified_base 38: mod_base = OTHER; note = 2'-O-methyl modified nucleotide
  modified_base 39: mod_base = OTHER; note = 2'-O-methyl modified nucleotide
  modified_base 40: mod_base = OTHER; note = 2'-O-methyl modified nucleotide
  modified_base 69: mod_base = OTHER; note = 2'-O-methyl modified nucleotide
  modified_base 70: mod_base = OTHER; note = 2'-O-methyl modified nucleotide
  modified_base 71: mod_base = OTHER; note = 2'-O-methyl modified nucleotide
  modified_base 72: mod_base = OTHER; note = 2'-O-methyl modified nucleotide
  modified_base 73: mod_base = OTHER; note = 2'-O-methyl modified nucleotide
  modified_base 74: mod_base = OTHER; note = 2'-O-methyl modified nucleotide
  modified_base 75: mod_base = OTHER; note = 2'-O-methyl modified nucleotide
  modified_base 76: mod_base = OTHER; note = 2'-O-methyl modified nucleotide
  modified_base 77: mod_base = OTHER; note = 2'-O-methyl modified nucleotide
  modified_base 78: mod_base = OTHER; note = 2'-O-methyl modified nucleotide
  modified_base 79: mod_base = OTHER; note = 2'-O-methyl modified nucleotide
  modified_base 80: mod_base = OTHER; note = 2'-O-methyl modified nucleotide
  modified_base 81: mod_base = OTHER; note = 2'-O-methyl modified nucleotide
  modified_base 82: mod_base = OTHER; note = 2'-O-methyl modified nucleotide
  modified_base 83: mod_base = OTHER; note = 2'-O-methyl modified nucleotide
  modified_base 84: mod_base = OTHER; note = 2'-O-methyl modified nucleotide
  modified_base 85: mod_base = OTHER; note = 2'-O-methyl modified nucleotide
  modified_base 86: mod_base = OTHER; note = 2'-O-methyl modified nucleotide
  modified_base 87: mod_base = OTHER; note = 2'-O-methyl modified nucleotide
  modified_base 88: mod_base = OTHER; note = 2'-O-methyl modified nucleotide
  modified_base 89: mod_base = OTHER; note = 2'-O-methyl modified nucleotide
  modified_base 90: mod_base = OTHER; note = 2'-O-methyl modified nucleotide
  modified_base 91: mod_base = OTHER; note = 2'-O-methyl modified nucleotide
  modified_base 92: mod_base = OTHER; note = 2'-O-methyl modified nucleotide
  modified_base 93: mod_base = OTHER; note = 2'-O-methyl modified nucleotide
  modified_base 94: mod_base = OTHER; note = 2'-O-methyl modified nucleotide
  modified_base 95: mod_base = OTHER; note = 2'-O-methyl modified nucleotide
  modified_base 96: mod_base = OTHER; note = 2'-O-methyl modified nucleotide
  modified_base 123: mod_base = OTHER; note = Nucleotide with phosphorothioate linkage
  modified_base 124: mod_base = OTHER; note = 2'-O-methyl modified nucleotide with phosphorothioate linkage
  modified_base 125: mod_base = OTHER; note = 2'-O-methyl modified nucleotide with phosphorothioate linkage
  modified_base 126: mod_base = OTHER; note = 2'-O-methyl modified nucleotide
gctggtacacggcagggtcagttttagagctagaaatagcaagttaaaataaggctagtccgttatcaacttgaaaaagtggcaccgagtcggtgctccagaaccctgatagtgccctgccgtgta

SEQ ID NO: 16447 - RNA, 125 nt, synthetic construct
  source 1..125: mol_type = other RNA
  modified_base 1: mod_base = OTHER; note = 2'-O-methyl modified nucleotide with phosphorothioate linkage
  modified_base 2: mod_base = OTHER; note = 2'-O-methyl modified nucleotide with phosphorothioate linkage
  modified_base 3: mod_base = OTHER; note = 2'-O-methyl modified nucleotide with phosphorothioate linkage
  modified_base 29: mod_base = OTHER; note = 2'-O-methyl modified nucleotide
  modified_base 30: mod_base = OTHER; note = 2'-O-methyl modified nucleotide
  modified_base 31: mod_base = OTHER; note = 2'-O-methyl modified nucleotide
  modified_base 32: mod_base = OTHER; note = 2'-O-methyl modified nucleotide
  modified_base 33: mod_base = OTHER; note = 2'-O-methyl modified nucleotide
  modified_base 34: mod_base = OTHER; note = 2'-O-methyl modified nucleotide
  modified_base 35: mod_base = OTHER; note = 2'-O-methyl modified nucleotide
  modified_base 36: mod_base = OTHER; note = 2'-O-methyl modified nucleotide
  modified_base 37: mod_base = OTHER; note = 2'-O-methyl modified nucleotide
  modified_base 38: mod_base = OTHER; note = 2'-O-methyl modified nucleotide
  modified_base 39: mod_base = OTHER; note = 2'-O-methyl modified nucleotide
  modified_base 40: mod_base = OTHER; note = 2'-O-methyl modified nucleotide
  modified_base 69: mod_base = OTHER; note = 2'-O-methyl modified nucleotide
  modified_base 70: mod_base = OTHER; note = 2'-O-methyl modified nucleotide
  modified_base 71: mod_base = OTHER; note = 2'-O-methyl modified nucleotide
  modified_base 72: mod_base = OTHER; note = 2'-O-methyl modified nucleotide
  modified_base 73: mod_base = OTHER; note = 2'-O-methyl modified nucleotide
  modified_base 74: mod_base = OTHER; note = 2'-O-methyl modified nucleotide
  modified_base 75: mod_base = OTHER; note = 2'-O-methyl modified nucleotide
  modified_base 76: mod_base = OTHER; note = 2'-O-methyl modified nucleotide
  modified_base 77: mod_base = OTHER; note = 2'-O-methyl modified nucleotide
  modified_base 78: mod_base = OTHER; note = 2'-O-methyl modified nucleotide
  modified_base 79: mod_base = OTHER; note = 2'-O-methyl modified nucleotide
  modified_base 80: mod_base = OTHER; note = 2'-O-methyl modified nucleotide
  modified_base 81: mod_base = OTHER; note = 2'-O-methyl modified nucleotide
  modified_base 82: mod_base = OTHER; note = 2'-O-methyl modified nucleotide
  modified_base 83: mod_base = OTHER; note = 2'-O-methyl modified nucleotide
  modified_base 84: mod_base = OTHER; note = 2'-O-methyl modified nucleotide
  modified_base 85: mod_base = OTHER; note = 2'-O-methyl modified nucleotide
  modified_base 86: mod_base = OTHER; note = 2'-O-methyl modified nucleotide
  modified_base 87: mod_base = OTHER; note = 2'-O-methyl modified nucleotide
  modified_base 88: mod_base = OTHER; note = 2'-O-methyl modified nucleotide
  modified_base 89: mod_base = OTHER; note = 2'-O-methyl modified nucleotide
  modified_base 90: mod_base = OTHER; note = 2'-O-methyl modified nucleotide
  modified_base 91: mod_base = OTHER; note = 2'-O-methyl modified nucleotide
  modified_base 92: mod_base = OTHER; note = 2'-O-methyl modified nucleotide
  modified_base 93: mod_base = OTHER; note = 2'-O-methyl modified nucleotide
  modified_base 94: mod_base = OTHER; note = 2'-O-methyl modified nucleotide
  modified_base 95: mod_base = OTHER; note = 2'-O-methyl modified nucleotide
  modified_base 96: mod_base = OTHER; note = 2'-O-methyl modified nucleotide
  modified_base 122: mod_base = OTHER; note = Nucleotide with phosphorothioate linkage
  modified_base 123: mod_base = OTHER; note = 2'-O-methyl modified nucleotide with phosphorothioate linkage
  modified_base 124: mod_base = OTHER; note = 2'-O-methyl modified nucleotide with phosphorothioate linkage
  modified_base 125: mod_base = OTHER; note = 2'-O-methyl modified nucleotide
gctggtacacggcagggtcagttttagagctagaaatagcaagttaaaataaggctagtccgttatcaacttgaaaaagtggcaccgagtcggtgctccagaaccctgatagtgccctgccgtgt

SEQ ID NO: 16448 - RNA, 124 nt, synthetic construct
  source 1..124: mol_type = other RNA
  modified_base 1: mod_base = OTHER; note = 2'-O-methyl modified nucleotide with phosphorothioate linkage
  modified_base 2: mod_base = OTHER; note = 2'-O-methyl modified nucleotide with phosphorothioate linkage
  modified_base 3: mod_base = OTHER; note = 2'-O-methyl modified nucleotide with phosphorothioate linkage
  modified_base 29: mod_base = OTHER; note = 2'-O-methyl modified nucleotide
  modified_base 30: mod_base = OTHER; note = 2'-O-methyl modified nucleotide
  modified_base 31: mod_base = OTHER; note = 2'-O-methyl modified nucleotide
  modified_base 32: mod_base = OTHER; note = 2'-O-methyl modified nucleotide
  modified_base 33: mod_base = OTHER; note = 2'-O-methyl modified nucleotide
  modified_base 34: mod_base = OTHER; note = 2'-O-methyl modified nucleotide
  modified_base 35: mod_base = OTHER; note = 2'-O-methyl modified nucleotide
  modified_base 36: mod_base = OTHER; note = 2'-O-methyl modified nucleotide
  modified_base 37: mod_base = OTHER; note = 2'-O-methyl modified nucleotide
  modified_base 38: mod_base = OTHER; note = 2'-O-methyl modified nucleotide
  modified_base 39: mod_base = OTHER; note = 2'-O-methyl modified nucleotide
  modified_base 40: mod_base = OTHER; note = 2'-O-methyl modified nucleotide
  modified_base 69: mod_base = OTHER; note = 2'-O-methyl modified nucleotide
  modified_base 70: mod_base = OTHER; note = 2'-O-methyl modified nucleotide
  modified_base 71: mod_base = OTHER; note = 2'-O-methyl modified nucleotide
  modified_base 72: mod_base = OTHER; note = 2'-O-methyl modified nucleotide
  modified_base 73: mod_base = OTHER; note = 2'-O-methyl modified nucleotide
  modified_base 74: mod_base = OTHER; note = 2'-O-methyl modified nucleotide
  modified_base 75: mod_base = OTHER; note = 2'-O-methyl modified nucleotide
  modified_base 76: mod_base = OTHER; note = 2'-O-methyl modified nucleotide
  modified_base 77: mod_base = OTHER; note = 2'-O-methyl modified nucleotide
  modified_base 78: mod_base = OTHER; note = 2'-O-methyl modified nucleotide
  modified_base 79: mod_base = OTHER; note = 2'-O-methyl modified nucleotide
  modified_base 80: mod_base = OTHER; note = 2'-O-methyl modified nucleotide
  modified_base 81: mod_base = OTHER; note = 2'-O-methyl modified nucleotide
  modified_base 82: mod_base = OTHER; note = 2'-O-methyl modified nucleotide
  modified_base 83: mod_base = OTHER; note = 2'-O-methyl modified nucleotide
  modified_base 84: mod_base = OTHER; note = 2'-O-methyl modified nucleotide
  modified_base 85: mod_base = OTHER; note = 2'-O-methyl modified nucleotide
  modified_base 86: mod_base = OTHER; note = 2'-O-methyl modified nucleotide
  modified_base 87: mod_base = OTHER; note = 2'-O-methyl modified nucleotide
  modified_base 88: mod_base = OTHER; note = 2'-O-methyl modified nucleotide
  modified_base 89: mod_base = OTHER; note = 2'-O-methyl modified nucleotide
  modified_base 90: mod_base = OTHER; note = 2'-O-methyl modified nucleotide
  modified_base 91: mod_base = OTHER; note = 2'-O-methyl modified nucleotide
  modified_base 92: mod_base = OTHER; note = 2'-O-methyl modified nucleotide
  modified_base 93: mod_base = OTHER; note = 2'-O-methyl modified nucleotide
  modified_base 94: mod_base = OTHER; note = 2'-O-methyl modified nucleotide
  modified_base 95: mod_base = OTHER; note = 2'-O-methyl modified nucleotide
  modified_base 96: mod_base = OTHER; note = 2'-O-methyl modified nucleotide
  modified_base 121: mod_base = OTHER; note = Nucleotide with phosphorothioate linkage
  modified_base 122: mod_base = OTHER; note = 2'-O-methyl modified nucleotide with phosphorothioate linkage
  modified_base 123: mod_base = OTHER; note = 2'-O-methyl modified nucleotide with phosphorothioate linkage
  modified_base 124: mod_base = OTHER; note = 2'-O-methyl modified nucleotide
gctggtacacggcagggtcagttttagagctagaaatagcaagttaaaataaggctagtccgttatcaacttgaaaaagtggcaccgagtcggtgctccagaaccctgatagtgccctgccgtg

SEQ ID NO: 16449 - RNA, 123 nt, synthetic construct
  source 1..123: mol_type = other RNA
  modified_base 1: mod_base = OTHER; note = 2'-O-methyl modified nucleotide with phosphorothioate linkage
  modified_base 2: mod_base = OTHER; note = 2'-O-methyl modified nucleotide with phosphorothioate linkage
  modified_base 3: mod_base = OTHER; note = 2'-O-methyl modified nucleotide with phosphorothioate linkage
  modified_base 29: mod_base = OTHER; note = 2'-O-methyl modified nucleotide
  modified_base 30: mod_base = OTHER; note = 2'-O-methyl modified nucleotide
  modified_base 31: mod_base = OTHER; note = 2'-O-methyl modified nucleotide
  modified_base 32: mod_base = OTHER; note = 2'-O-methyl modified nucleotide
  modified_base 33: mod_base = OTHER; note = 2'-O-methyl modified nucleotide
  modified_base 34: mod_base = OTHER; note = 2'-O-methyl modified nucleotide
  modified_base 35: mod_base = OTHER; note = 2'-O-methyl modified nucleotide
  modified_base 36: mod_base = OTHER; note = 2'-O-methyl modified nucleotide
  modified_base 37: mod_base = OTHER; note = 2'-O-methyl modified nucleotide
  modified_base 38: mod_base = OTHER; note = 2'-O-methyl modified nucleotide
  modified_base 39: mod_base = OTHER; note = 2'-O-methyl modified nucleotide
  modified_base 40: mod_base = OTHER; note = 2'-O-methyl modified nucleotide
  modified_base 69: mod_base = OTHER; note = 2'-O-methyl modified nucleotide
  modified_base 70: mod_base = OTHER; note = 2'-O-methyl modified nucleotide
  modified_base 71: mod_base = OTHER; note = 2'-O-methyl modified nucleotide
  modified_base 72: mod_base = OTHER; note = 2'-O-methyl modified nucleotide
  modified_base 73: mod_base = OTHER; note = 2'-O-methyl modified nucleotide
  modified_base 74: mod_base = OTHER; note = 2'-O-methyl modified nucleotide
  modified_base 75: mod_base = OTHER; note = 2'-O-methyl modified nucleotide
  modified_base 76: mod_base = OTHER; note = 2'-O-methyl modified nucleotide
  modified_base 77: mod_base = OTHER; note = 2'-O-methyl modified nucleotide
  modified_base 78: mod_base = OTHER; note = 2'-O-methyl modified nucleotide
  modified_base 79: mod_base = OTHER; note = 2'-O-methyl modified nucleotide
  modified_base 80: mod_base = OTHER; note = 2'-O-methyl modified nucleotide
  modified_base 81: mod_base = OTHER; note = 2'-O-methyl modified nucleotide
  modified_base 82: mod_base = OTHER; note = 2'-O-methyl modified nucleotide
  modified_base 83: mod_base = OTHER; note = 2'-O-methyl modified nucleotide
  modified_base 84: mod_base = OTHER; note = 2'-O-methyl modified nucleotide
  modified_base 85: mod_base = OTHER; note = 2'-O-methyl modified nucleotide
  modified_base 86: mod_base = OTHER; note = 2'-O-methyl modified nucleotide
  modified_base 87: mod_base = OTHER; note = 2'-O-methyl modified nucleotide
  modified_base 88: mod_base = OTHER; note = 2'-O-methyl modified nucleotide
  modified_base 89: mod_base = OTHER; note = 2'-O-methyl modified nucleotide
  modified_base 90: mod_base = OTHER; note = 2'-O-methyl modified nucleotide
  modified_base 91: mod_base = OTHER; note = 2'-O-methyl modified nucleotide
  modified_base 92: mod_base = OTHER; note = 2'-O-methyl modified nucleotide
  modified_base 93: mod_base = OTHER; note = 2'-O-methyl modified nucleotide
  modified_base 94: mod_base = OTHER; note = 2'-O-methyl modified nucleotide
  modified_base 95: mod_base = OTHER; note = 2'-O-methyl modified nucleotide
  modified_base 96: mod_base = OTHER; note = 2'-O-methyl modified nucleotide
  modified_base 120: mod_base = OTHER; note = Nucleotide with phosphorothioate linkage
  modified_base 121: mod_base = OTHER; note = 2'-O-methyl modified nucleotide with phosphorothioate linkage
  modified_base 122: mod_base = OTHER; note = 2'-O-methyl modified nucleotide with phosphorothioate linkage
  modified_base 123: mod_base = OTHER; note = 2'-O-methyl modified nucleotide
gctggtacacggcagggtcagttttagagctagaaatagcaagttaaaataaggctagtccgttatcaacttgaaaaagtggcaccgagtcggtgctccagaaccctgatagtgccctgccgt

SEQ ID NO: 16450 - RNA, 122 nt, synthetic construct
  source 1..122: mol_type = other RNA
  modified_base 1: mod_base = OTHER; note = 2'-O-methyl modified nucleotide with phosphorothioate linkage
  modified_base 2: mod_base = OTHER; note = 2'-O-methyl modified nucleotide with phosphorothioate linkage
  modified_base 3: mod_base = OTHER; note = 2'-O-methyl modified nucleotide with phosphorothioate linkage
  modified_base 29: mod_base = OTHER; note = 2'-O-methyl modified nucleotide
  modified_base 30: mod_base = OTHER; note = 2'-O-methyl modified nucleotide
  modified_base 31: mod_base = OTHER; note = 2'-O-methyl modified nucleotide
  modified_base 32: mod_base = OTHER; note = 2'-O-methyl modified nucleotide
  modified_base 33: mod_base = OTHER; note = 2'-O-methyl modified nucleotide
  modified_base 34: mod_base = OTHER; note = 2'-O-methyl modified nucleotide
  modified_base 35: mod_base = OTHER; note = 2'-O-methyl modified nucleotide
  modified_base 36: mod_base = OTHER; note = 2'-O-methyl modified nucleotide
  modified_base 37: mod_base = OTHER; note = 2'-O-methyl modified nucleotide
  modified_base 38: mod_base = OTHER; note = 2'-O-methyl modified nucleotide
  modified_base 39: mod_base = OTHER; note = 2'-O-methyl modified nucleotide
  modified_base 40: mod_base = OTHER; note = 2'-O-methyl modified nucleotide
  modified_base 69: mod_base = OTHER; note = 2'-O-methyl modified nucleotide
  modified_base 70: mod_base = OTHER; note = 2'-O-methyl modified nucleotide
  modified_base 71: mod_base = OTHER; note = 2'-O-methyl modified nucleotide
  modified_base 72: mod_base = OTHER; note = 2'-O-methyl modified nucleotide
  modified_base 73: mod_base = OTHER; note = 2'-O-methyl modified nucleotide
  modified_base 74: mod_base = OTHER; note = 2'-O-methyl modified nucleotide
  modified_base 75: mod_base = OTHER; note = 2'-O-methyl modified nucleotide
  modified_base 76: mod_base = OTHER; note = 2'-O-methyl modified nucleotide
  modified_base 77: mod_base = OTHER; note = 2'-O-methyl modified nucleotide
  modified_base 78: mod_base = OTHER; note = 2'-O-methyl modified nucleotide
  modified_base 79: mod_base = OTHER; note = 2'-O-methyl modified nucleotide
  modified_base 80: mod_base = OTHER; note = 2'-O-methyl modified nucleotide
  modified_base 81: mod_base = OTHER; note = 2'-O-methyl modified nucleotide
  modified_base 82: mod_base = OTHER; note = 2'-O-methyl modified nucleotide
  modified_base 83: mod_base = OTHER; note = 2'-O-methyl modified nucleotide
  modified_base 84: mod_base = OTHER; note = 2'-O-methyl modified nucleotide
  modified_base 85: mod_base = OTHER; note = 2'-O-methyl modified nucleotide
  modified_base 86: mod_base = OTHER; note = 2'-O-methyl modified nucleotide
  modified_base 87: mod_base = OTHER; note = 2'-O-methyl modified nucleotide
  modified_base 88: mod_base = OTHER; note = 2'-O-methyl modified nucleotide
  modified_base 89: mod_base = OTHER; note = 2'-O-methyl modified nucleotide
  modified_base 90: mod_base = OTHER; note = 2'-O-methyl modified nucleotide
  modified_base 91: mod_base = OTHER; note = 2'-O-methyl modified nucleotide
  modified_base 92: mod_base = OTHER; note = 2'-O-methyl modified nucleotide
  modified_base 93: mod_base = OTHER; note = 2'-O-methyl modified nucleotide
  modified_base 94: mod_base = OTHER; note = 2'-O-methyl modified nucleotide
  modified_base 95: mod_base = OTHER; note = 2'-O-methyl modified nucleotide
  modified_base 96: mod_base = OTHER; note = 2'-O-methyl modified nucleotide
  modified_base 119: mod_base = OTHER; note = Nucleotide with phosphorothioate linkage
  modified_base 120: mod_base = OTHER; note = 2'-O-methyl modified nucleotide with phosphorothioate linkage
  modified_base 121: mod_base = OTHER; note = 2'-O-methyl modified nucleotide with phosphorothioate linkage
  modified_base 122: mod_base = OTHER; note = 2'-O-methyl modified nucleotide
gctggtacacggcagggtcagttttagagctagaaatagcaagttaaaataaggctagtccgttatcaacttgaaaaagtggcaccgagtcggtgctccagaaccctgatagtgccctgccg

SEQ ID NO: 16451 - RNA, 129 nt, synthetic construct
  source 1..129: mol_type = other RNA
  modified_base 1: mod_base = OTHER; note = 2'-O-methyl modified nucleotide with phosphorothioate linkage
  modified_base 2: mod_base = OTHER; note = 2'-O-methyl modified nucleotide with phosphorothioate linkage
  modified_base 3: mod_base = OTHER; note = 2'-O-methyl modified nucleotide with phosphorothioate linkage
  modified_base 29: mod_base = OTHER; note = 2'-O-methyl modified nucleotide
  modified_base 30: mod_base = OTHER; note = 2'-O-methyl modified nucleotide
  modified_base 31: mod_base = OTHER; note = 2'-O-methyl modified nucleotide
  modified_base 32: mod_base = OTHER; note = 2'-O-methyl modified nucleotide
  modified_base 33: mod_base = OTHER; note = 2'-O-methyl modified nucleotide
  modified_base 34: mod_base = OTHER; note = 2'-O-methyl modified nucleotide
  modified_base 35: mod_base = OTHER; note = 2'-O-methyl modified nucleotide
  modified_base 36: mod_base = OTHER; note = 2'-O-methyl modified nucleotide
  modified_base 37: mod_base = OTHER; note = 2'-O-methyl modified nucleotide
  modified_base 38: mod_base = OTHER; note = 2'-O-methyl modified nucleotide
  modified_base 39: mod_base = OTHER; note = 2'-O-methyl modified nucleotide
  modified_base 40: mod_base = OTHER; note = 2'-O-methyl modified nucleotide
  modified_base 69: mod_base = OTHER; note = 2'-O-methyl modified nucleotide
  modified_base 70: mod_base = OTHER; note = 2'-O-methyl modified nucleotide
  modified_base 71: mod_base = OTHER; note = 2'-O-methyl modified nucleotide
  modified_base 72: mod_base = OTHER; note = 2'-O-methyl modified nucleotide
  modified_base 73: mod_base = OTHER; note = 2'-O-methyl modified nucleotide
  modified_base 74: mod_base = OTHER; note = 2'-O-methyl modified nucleotide
  modified_base 75: mod_base = OTHER; note = 2'-O-methyl modified nucleotide
  modified_base 76: mod_base = OTHER; note = 2'-O-methyl modified nucleotide
  modified_base 77: mod_base = OTHER; note = 2'-O-methyl modified nucleotide
  modified_base 78: mod_base = OTHER; note = 2'-O-methyl modified nucleotide
  modified_base 79: mod_base = OTHER; note = 2'-O-methyl modified nucleotide
  modified_base 80: mod_base = OTHER; note = 2'-O-methyl modified nucleotide
  modified_base 81: mod_base = OTHER; note = 2'-O-methyl modified nucleotide
  modified_base 82: mod_base = OTHER; note = 2'-O-methyl modified nucleotide
  modified_base 83: mod_base = OTHER; note = 2'-O-methyl modified nucleotide
  modified_base 84: mod_base = OTHER; note = 2'-O-methyl modified nucleotide
  modified_base 85: mod_base = OTHER; note = 2'-O-methyl modified nucleotide
  modified_base 86: mod_base = OTHER; note = 2'-O-methyl modified nucleotide
  modified_base 87: mod_base = OTHER; note = 2'-O-methyl modified nucleotide
  modified_base 88: mod_base = OTHER; note = 2'-O-methyl modified nucleotide
  modified_base 89: mod_base = OTHER; note = 2'-O-methyl modified nucleotide
  modified_base 90: mod_base = OTHER; note = 2'-O-methyl modified nucleotide
  modified_base 91: mod_base = OTHER; note = 2'-O-methyl modified nucleotide
  modified_base 92: mod_base = OTHER; note = 2'-O-methyl modified nucleotide
  modified_base 93: mod_base = OTHER; note = 2'-O-methyl modified nucleotide
  modified_base 94: mod_base = OTHER; note = 2'-O-methyl modified nucleotide
  modified_base 95: mod_base = OTHER; note = 2'-O-methyl modified nucleotide
  modified_base 96: mod_base = OTHER; note = 2'-O-methyl modified nucleotide
  modified_base 126: mod_base = OTHER; note = Nucleotide with phosphorothioate linkage
  modified_base 127: mod_base = OTHER; note = 2'-O-methyl modified nucleotide with phosphorothioate linkage
  modified_base 128: mod_base = OTHER; note = 2'-O-methyl modified nucleotide with phosphorothioate linkage
  modified_base 129: mod_base = OTHER; note = 2'-O-methyl modified nucleotide
gctggtacacggcagggtcagttttagagctagaaatagcaagttaaaataaggctagtccgttatcaacttgaaaaagtggcaccgagtcggtgctatccagaaccctgatagtgccctgccgtgtac

SEQ ID NO: 16452 - RNA, 128 nt, synthetic construct
  source 1..128: mol_type = other RNA
  modified_base 1: mod_base = OTHER; note = 2'-O-methyl modified nucleotide with phosphorothioate linkage
  modified_base 2: mod_base = OTHER; note = 2'-O-methyl modified nucleotide with phosphorothioate linkage
  modified_base 3: mod_base = OTHER; note = 2'-O-methyl modified nucleotide with phosphorothioate linkage
  modified_base 29: mod_base = OTHER; note = 2'-O-methyl modified nucleotide
  modified_base 30: mod_base = OTHER; note = 2'-O-methyl modified nucleotide
  modified_base 31: mod_base = OTHER; note = 2'-O-methyl modified nucleotide
  modified_base 32: mod_base = OTHER; note = 2'-O-methyl modified nucleotide
  modified_base 33: mod_base = OTHER; note = 2'-O-methyl modified nucleotide
  modified_base 34: mod_base = OTHER; note = 2'-O-methyl modified nucleotide
  modified_base 35: mod_base = OTHER; note = 2'-O-methyl modified nucleotide
  modified_base 36: mod_base = OTHER; note = 2'-O-methyl modified nucleotide
  modified_base 37: mod_base = OTHER; note = 2'-O-methyl modified nucleotide
  modified_base 38: mod_base = OTHER; note = 2'-O-methyl modified nucleotide
  modified_base 39: mod_base = OTHER; note = 2'-O-methyl modified nucleotide
  modified_base 40: mod_base = OTHER; note = 2'-O-methyl modified nucleotide
  modified_base 69: mod_base = OTHER; note = 2'-O-methyl modified nucleotide
  modified_base 70: mod_base = OTHER; note = 2'-O-methyl modified nucleotide
  modified_base 71: mod_base = OTHER; note = 2'-O-methyl modified nucleotide
  modified_base 72: mod_base = OTHER; note = 2'-O-methyl modified nucleotide
  modified_base 73: mod_base = OTHER; note = 2'-O-methyl modified nucleotide
  modified_base 74: mod_base = OTHER; note = 2'-O-methyl modified nucleotide
  modified_base 75: mod_base = OTHER; note = 2'-O-methyl modified nucleotide
  modified_base 76: mod_base = OTHER; note = 2'-O-methyl modified nucleotide
  modified_base 77: mod_base = OTHER; note = 2'-O-methyl modified nucleotide
  modified_base 78: mod_base = OTHER; note = 2'-O-methyl modified nucleotide
  modified_base 79: mod_base = OTHER; note = 2'-O-methyl modified nucleotide
  modified_base 80: mod_base = OTHER; note = 2'-O-methyl modified nucleotide
  modified_base 81: mod_base = OTHER; note = 2'-O-methyl modified nucleotide
  modified_base 82: mod_base = OTHER; note = 2'-O-methyl modified nucleotide
  modified_base 83: mod_base = OTHER; note = 2'-O-methyl modified nucleotide
  modified_base 84: mod_base = OTHER; note = 2'-O-methyl modified nucleotide
  modified_base 85: mod_base = OTHER; note = 2'-O-methyl modified nucleotide
  modified_base 86: mod_base = OTHER; note = 2'-O-methyl modified nucleotide
  modified_base 87: mod_base = OTHER; note = 2'-O-methyl modified nucleotide
  modified_base 88: mod_base = OTHER; note = 2'-O-methyl modified nucleotide
  modified_base 89: mod_base = OTHER; note = 2'-O-methyl modified nucleotide
  modified_base 90: mod_base = OTHER; note = 2'-O-methyl modified nucleotide
  modified_base 91: mod_base = OTHER; note = 2'-O-methyl modified nucleotide
  modified_base 92: mod_base = OTHER; note = 2'-O-methyl modified nucleotide
  modified_base 93: mod_base = OTHER; note = 2'-O-methyl modified nucleotide
  modified_base 94: mod_base = OTHER; note = 2'-O-methyl modified nucleotide
  modified_base 95: mod_base = OTHER; note = 2'-O-methyl modified nucleotide
  modified_base 96: mod_base = OTHER; note = 2'-O-methyl modified nucleotide
  modified_base 125: mod_base = OTHER; note = Nucleotide with phosphorothioate linkage
  modified_base 126: mod_base = OTHER; note = 2'-O-methyl modified nucleotide with phosphorothioate linkage
  modified_base 127: mod_base = OTHER; note = 2'-O-methyl modified nucleotide with phosphorothioate linkage
  modified_base 128: mod_base = OTHER; note = 2'-O-methyl modified nucleotide
gctggtacacggcagggtcagttttagagctagaaatagcaagttaaaataaggctagtccgttatcaacttgaaaaagtggcaccgagtcggtgctatccagaaccctgatagtgccctgccgtgta

SEQ ID NO: 16453 - RNA, 127 nt, synthetic construct
  source 1..127: mol_type = other RNA
  modified_base 1: mod_base = OTHER; note = 2'-O-methyl modified nucleotide with phosphorothioate linkage
  modified_base 2: mod_base = OTHER; note = 2'-O-methyl modified nucleotide with phosphorothioate linkage
  modified_base 3: mod_base = OTHER; note = 2'-O-methyl modified nucleotide with phosphorothioate linkage
  modified_base 29: mod_base = OTHER; note = 2'-O-methyl modified nucleotide
  modified_base 30: mod_base = OTHER; note = 2'-O-methyl modified nucleotide
  modified_base 31: mod_base = OTHER; note = 2'-O-methyl modified nucleotide
  modified_base 32: mod_base = OTHER; note = 2'-O-methyl modified nucleotide
  modified_base 33: mod_base = OTHER; note = 2'-O-methyl modified nucleotide
  modified_base 34: mod_base = OTHER; note = 2'-O-methyl modified nucleotide
  modified_base 35: mod_base = OTHER; note = 2'-O-methyl modified nucleotide
  modified_base 36: mod_base = OTHER; note = 2'-O-methyl modified nucleotide
  modified_base 37: mod_base = OTHER; note = 2'-O-methyl modified nucleotide
  modified_base 38: mod_base = OTHER; note = 2'-O-methyl modified nucleotide
  modified_base 39: mod_base = OTHER; note = 2'-O-methyl modified nucleotide
  modified_base 40: mod_base = OTHER; note = 2'-O-methyl modified nucleotide
  modified_base 69: mod_base = OTHER; note = 2'-O-methyl modified nucleotide
  modified_base 70: mod_base = OTHER; note = 2'-O-methyl modified nucleotide
  modified_base 71: mod_base = OTHER; note = 2'-O-methyl modified nucleotide
  modified_base 72: mod_base = OTHER; note = 2'-O-methyl modified nucleotide
  modified_base 73: mod_base = OTHER; note = 2'-O-methyl modified nucleotide
  modified_base 74: mod_base = OTHER; note = 2'-O-methyl modified nucleotide
  modified_base 75: mod_base = OTHER; note = 2'-O-methyl modified nucleotide
  modified_base 76: mod_base = OTHER; note = 2'-O-methyl modified nucleotide
  modified_base 77: mod_base = OTHER; note = 2'-O-methyl modified nucleotide
  modified_base 78: mod_base = OTHER; note = 2'-O-methyl modified nucleotide
  modified_base 79: mod_base = OTHER; note = 2'-O-methyl modified nucleotide
  modified_base 80: mod_base = OTHER; note = 2'-O-methyl modified nucleotide
  modified_base 81: mod_base = OTHER; note = 2'-O-methyl modified nucleotide
  modified_base 82: mod_base = OTHER; note = 2'-O-methyl modified nucleotide
  modified_base 83: mod_base = OTHER; note = 2'-O-methyl modified nucleotide
  modified_base 84: mod_base = OTHER; note = 2'-O-methyl modified nucleotide
  modified_base 85: mod_base = OTHER; note = 2'-O-methyl modified nucleotide
  modified_base 86: mod_base = OTHER; note = 2'-O-methyl modified nucleotide
  modified_base 87: mod_base = OTHER; note = 2'-O-methyl modified nucleotide
  modified_base 88: mod_base = OTHER; note = 2'-O-methyl modified nucleotide
  modified_base 89: mod_base = OTHER; note = 2'-O-methyl modified nucleotide
  modified_base 90: mod_base = OTHER; note = 2'-O-methyl modified nucleotide
  modified_base 91: mod_base = OTHER; note = 2'-O-methyl modified nucleotide
  modified_base 92: mod_base = OTHER; note = 2'-O-methyl modified nucleotide
  modified_base 93: mod_base = OTHER; note = 2'-O-methyl modified nucleotide
  modified_base 94: mod_base = OTHER; note = 2'-O-methyl modified nucleotide
  modified_base 95: mod_base = OTHER; note = 2'-O-methyl modified nucleotide
  modified_base 96: mod_base = OTHER; note = 2'-O-methyl modified nucleotide
  modified_base 124: mod_base = OTHER; note = Nucleotide with phosphorothioate linkage
  modified_base 125: mod_base = OTHER; note = 2'-O-methyl modified nucleotide with phosphorothioate linkage
  modified_base 126: mod_base = OTHER; note = 2'-O-methyl modified nucleotide with phosphorothioate linkage
  modified_base 127: mod_base = OTHER; note = 2'-O-methyl modified nucleotide
gctggtacacggcagggtcagttttagagctagaaatagcaagttaaaataaggctagtccgttatcaacttgaaaaagtggcaccgagtcggtgctatccagaaccctgatagtgccctgccgtgt

SEQ ID NO: 16454 - RNA, 126 nt, synthetic construct
  source 1..126: mol_type = other RNA
  modified_base 1: mod_base = OTHER; note = 2'-O-methyl modified nucleotide with phosphorothioate linkage
  modified_base 2: mod_base = OTHER; note = 2'-O-methyl modified nucleotide with phosphorothioate linkage
  modified_base 3: mod_base = OTHER; note = 2'-O-methyl modified nucleotide with phosphorothioate linkage
  modified_base 29: mod_base = OTHER; note = 2'-O-methyl modified nucleotide
  modified_base 30: mod_base = OTHER; note = 2'-O-methyl modified nucleotide
  modified_base 31: mod_base = OTHER; note = 2'-O-methyl modified nucleotide
  modified_base 32: mod_base = OTHER; note = 2'-O-methyl modified nucleotide
  modified_base 33: mod_base = OTHER; note = 2'-O-methyl modified nucleotide
  modified_base 34: mod_base = OTHER; note = 2'-O-methyl modified nucleotide
  modified_base 35: mod_base = OTHER; note = 2'-O-methyl modified nucleotide
  modified_base 36: mod_base = OTHER; note = 2'-O-methyl modified nucleotide
  modified_base 37: mod_base = OTHER; note = 2'-O-methyl modified nucleotide
  modified_base 38: mod_base = OTHER; note = 2'-O-methyl modified nucleotide
  modified_base 39: mod_base = OTHER; note = 2'-O-methyl modified nucleotide
  modified_base 40: mod_base = OTHER; note = 2'-O-methyl modified nucleotide
  modified_base 69: mod_base = OTHER; note = 2'-O-methyl modified nucleotide
  modified_base 70: mod_base = OTHER; note = 2'-O-methyl modified nucleotide
  modified_base 71: mod_base = OTHER; note = 2'-O-methyl modified nucleotide
  modified_base 72: mod_base = OTHER; note = 2'-O-methyl modified nucleotide
  modified_base 73: mod_base = OTHER; note = 2'-O-methyl modified nucleotide
  modified_base 74: mod_base = OTHER; note = 2'-O-methyl modified nucleotide
  modified_base 75: mod_base = OTHER; note = 2'-O-methyl modified nucleotide
  modified_base 76: mod_base = OTHER; note = 2'-O-methyl modified nucleotide
  modified_base 77: mod_base = OTHER; note = 2'-O-methyl modified nucleotide
  modified_base 78: mod_base = OTHER; note = 2'-O-methyl modified nucleotide
  modified_base 79: mod_base = OTHER; note = 2'-O-methyl modified nucleotide
  modified_base 80: mod_base = OTHER; note = 2'-O-methyl modified nucleotide
  modified_base 81: mod_base = OTHER; note = 2'-O-methyl modified nucleotide
  modified_base 82: mod_base = OTHER; note = 2'-O-methyl modified nucleotide
  modified_base 83: mod_base = OTHER; note = 2'-O-methyl modified nucleotide
  modified_base 84: mod_base = OTHER; note = 2'-O-methyl modified nucleotide
  modified_base 85: mod_base = OTHER; note = 2'-O-methyl modified nucleotide
  modified_base 86: mod_base = OTHER; note = 2'-O-methyl modified nucleotide
  modified_base 87: mod_base = OTHER; note = 2'-O-methyl modified nucleotide
  modified_base 88: mod_base = OTHER; note = 2'-O-methyl modified nucleotide
  modified_base 89: mod_base = OTHER; note = 2'-O-methyl modified nucleotide
  modified_base 90: mod_base = OTHER; note = 2'-O-methyl modified nucleotide
  modified_base 91: mod_base = OTHER; note = 2'-O-methyl modified nucleotide
  modified_base 92: mod_base = OTHER; note = 2'-O-methyl modified nucleotide
  modified_base 93: mod_base = OTHER; note = 2'-O-methyl modified nucleotide
  modified_base 94: mod_base = OTHER; note = 2'-O-methyl modified nucleotide
  modified_base 95: mod_base = OTHER; note = 2'-O-methyl modified nucleotide
  modified_base 96: mod_base = OTHER; note = 2'-O-methyl modified nucleotide
  modified_base 123: mod_base = OTHER; note = Nucleotide with phosphorothioate linkage
  modified_base 124: mod_base = OTHER; note = 2'-O-methyl modified nucleotide with phosphorothioate linkage
  modified_base 125: mod_base = OTHER; note = 2'-O-methyl modified nucleotide with phosphorothioate linkage
  modified_base 126: mod_base = OTHER; note = 2'-O-methyl modified nucleotide
gctggtacacggcagggtcagttttagagctagaaatagcaagttaaaataaggctagtccgttatcaacttgaaaaagtggcaccgagtcggtgctatccagaaccctgatagtgccctgccgtg

SEQ ID NO: 16455 - RNA, 125 nt, synthetic construct
  source 1..125: mol_type = other RNA
  modified_base 1: mod_base = OTHER; note = 2'-O-methyl modified nucleotide with phosphorothioate linkage
  modified_base 2: mod_base = OTHER; note = 2'-O-methyl modified nucleotide with phosphorothioate linkage
  modified_base 3: mod_base = OTHER; note = 2'-O-methyl modified nucleotide with phosphorothioate linkage
  modified_base 29: mod_base = OTHER; note = 2'-O-methyl modified nucleotide
  modified_base 30: mod_base = OTHER; note = 2'-O-methyl modified nucleotide
  modified_base 31: mod_base = OTHER; note = 2'-O-methyl modified nucleotide
  modified_base 32: mod_base = OTHER; note = 2'-O-methyl modified nucleotide
  modified_base 33: mod_base = OTHER; note = 2'-O-methyl modified nucleotide
  modified_base 34: mod_base = OTHER; note = 2'-O-methyl modified nucleotide
  modified_base 35: mod_base = OTHER; note = 2'-O-methyl modified nucleotide
  modified_base 36: mod_base = OTHER; note = 2'-O-methyl modified nucleotide
  modified_base 37: mod_base = OTHER; note = 2'-O-methyl modified nucleotide
  modified_base 38: mod_base = OTHER; note = 2'-O-methyl modified nucleotide
  modified_base 39: mod_base = OTHER; note = 2'-O-methyl modified nucleotide
  modified_base 40: mod_base = OTHER; note = 2'-O-methyl modified nucleotide
  modified_base 69: mod_base = OTHER; note = 2'-O-methyl modified nucleotide
  modified_base 70: mod_base = OTHER; note = 2'-O-methyl modified nucleotide
  modified_base 71: mod_base = OTHER; note = 2'-O-methyl modified nucleotide
  modified_base 72: mod_base = OTHER; note = 2'-O-methyl modified nucleotide
  modified_base 73: mod_base = OTHER; note = 2'-O-methyl modified nucleotide
  modified_base 74: mod_base = OTHER; note = 2'-O-methyl modified nucleotide
  modified_base 75: mod_base = OTHER; note = 2'-O-methyl modified nucleotide
  modified_base 76: mod_base = OTHER; note = 2'-O-methyl modified nucleotide
  modified_base 77: mod_base = OTHER; note = 2'-O-methyl modified nucleotide
  modified_base 78: mod_base = OTHER; note = 2'-O-methyl modified nucleotide
  modified_base 79: mod_base = OTHER; note = 2'-O-methyl modified nucleotide
  modified_base 80: mod_base = OTHER; note = 2'-O-methyl modified nucleotide
  modified_base 81: mod_base = OTHER; note = 2'-O-methyl modified nucleotide
  modified_base 82: mod_base = OTHER; note = 2'-O-methyl modified nucleotide
  modified_base 83: mod_base = OTHER; note = 2'-O-methyl modified nucleotide
  modified_base 84: mod_base = OTHER; note = 2'-O-methyl modified nucleotide
  modified_base 85: mod_base = OTHER; note = 2'-O-methyl modified nucleotide
  modified_base 86: mod_base = OTHER; note = 2'-O-methyl modified nucleotide
  modified_base 87: mod_base = OTHER; note = 2'-O-methyl modified nucleotide
  modified_base 88: mod_base = OTHER; note = 2'-O-methyl modified nucleotide
  modified_base 89: mod_base = OTHER; note = 2'-O-methyl modified nucleotide
  modified_base 90: mod_base = OTHER; note = 2'-O-methyl modified nucleotide
  modified_base 91: mod_base = OTHER; note = 2'-O-methyl modified nucleotide
  modified_base 92: mod_base = OTHER; note = 2'-O-methyl modified nucleotide
  modified_base 93: mod_base = OTHER; note = 2'-O-methyl modified nucleotide
  modified_base 94: mod_base = OTHER; note = 2'-O-methyl modified nucleotide
  modified_base 95: mod_base = OTHER; note = 2'-O-methyl modified nucleotide
  modified_base 96: mod_base = OTHER; note = 2'-O-methyl modified nucleotide
  modified_base 122: mod_base = OTHER; note = Nucleotide with phosphorothioate linkage
  modified_base 123: mod_base = OTHER; note = 2'-O-methyl modified nucleotide with phosphorothioate linkage
  modified_base 124: mod_base = OTHER; note = 2'-O-methyl modified nucleotide with phosphorothioate linkage
  modified_base 125: mod_base = OTHER; note = 2'-O-methyl modified nucleotide
gctggtacacggcagggtcagttttagagctagaaatagcaagttaaaataaggctagtccgttatcaacttgaaaaagtggcaccgagtcggtgctatccagaaccctgatagtgccctgccgt

SEQ ID NO: 16456 - RNA, 124 nt, synthetic construct
  source 1..124: mol_type = other RNA
  modified_base 1: mod_base = OTHER; note = 2'-O-methyl modified nucleotide with phosphorothioate linkage
  modified_base 2: mod_base = OTHER; note = 2'-O-methyl modified nucleotide with phosphorothioate linkage
  modified_base 3: mod_base = OTHER; note = 2'-O-methyl modified nucleotide with phosphorothioate linkage
  modified_base 29: mod_base = OTHER; note = 2'-O-methyl modified nucleotide
  modified_base 30: mod_base = OTHER; note = 2'-O-methyl modified nucleotide
  modified_base 31: mod_base = OTHER; note = 2'-O-methyl modified nucleotide
  modified_base 32: mod_base = OTHER; note = 2'-O-methyl modified nucleotide
  modified_base 33: mod_base = OTHER; note = 2'-O-methyl modified nucleotide
  modified_base 34: mod_base = OTHER; note = 2'-O-methyl modified nucleotide
  modified_base 35: mod_base = OTHER; note = 2'-O-methyl modified nucleotide
  modified_base 36: mod_base = OTHER; note = 2'-O-methyl modified nucleotide
  modified_base 37: mod_base = OTHER; note = 2'-O-methyl modified nucleotide
  modified_base 38: mod_base = OTHER; note = 2'-O-methyl modified nucleotide
  modified_base 39: mod_base = OTHER; note = 2'-O-methyl modified nucleotide
  modified_base 40: mod_base = OTHER; note = 2'-O-methyl modified nucleotide
  modified_base 69: mod_base = OTHER; note = 2'-O-methyl modified nucleotide
  modified_base 70: mod_base = OTHER; note = 2'-O-methyl modified nucleotide
  modified_base 71: mod_base = OTHER; note = 2'-O-methyl modified nucleotide
  modified_base 72: mod_base = OTHER; note = 2'-O-methyl modified nucleotide
  modified_base 73: mod_base = OTHER; note = 2'-O-methyl modified nucleotide
  modified_base 74: mod_base = OTHER; note = 2'-O-methyl modified nucleotide
  modified_base 75: mod_base = OTHER; note = 2'-O-methyl modified nucleotide
  modified_base 76: mod_base = OTHER; note = 2'-O-methyl modified nucleotide
  modified_base 77: mod_base = OTHER; note = 2'-O-methyl modified nucleotide
  modified_base 78: mod_base = OTHER; note = 2'-O-methyl modified nucleotide
  modified_base 79: mod_base = OTHER; note = 2'-O-methyl modified nucleotide
  modified_base 80: mod_base = OTHER; note = 2'-O-methyl modified nucleotide
  modified_base 81: mod_base = OTHER; note = 2'-O-methyl modified nucleotide
  modified_base 82: mod_base = OTHER; note = 2'-O-methyl modified nucleotide
  modified_base 83: mod_base = OTHER; note = 2'-O-methyl modified nucleotide
  modified_base 84: mod_base = OTHER; note = 2'-O-methyl modified nucleotide
  modified_base 85: mod_base = OTHER; note = 2'-O-methyl modified nucleotide
  modified_base 86: mod_base = OTHER; note = 2'-O-methyl modified nucleotide
  modified_base 87: mod_base = OTHER; note = 2'-O-methyl modified nucleotide
  modified_base 88: mod_base = OTHER; note = 2'-O-methyl modified nucleotide
  modified_base 89: mod_base = OTHER; note = 2'-O-methyl modified nucleotide
  modified_base 90: mod_base = OTHER; note = 2'-O-methyl modified nucleotide
  modified_base 91: mod_base = OTHER; note = 2'-O-methyl modified nucleotide
  modified_base 92: mod_base = OTHER; note = 2'-O-methyl modified nucleotide
  modified_base 93: mod_base = OTHER; note = 2'-O-methyl modified nucleotide
  modified_base 94: mod_base = OTHER; note = 2'-O-methyl modified nucleotide
  modified_base 95: mod_base = OTHER; note = 2'-O-methyl modified nucleotide
  modified_base 96: mod_base = OTHER; note = 2'-O-methyl modified nucleotide
  modified_base 121: mod_base = OTHER; note = Nucleotide with phosphorothioate linkage
  modified_base 122: mod_base = OTHER; note = 2'-O-methyl modified nucleotide with phosphorothioate linkage
  modified_base 123: mod_base = OTHER; note = 2'-O-methyl modified nucleotide with phosphorothioate linkage
  modified_base 124: mod_base = OTHER; note = 2'-O-methyl modified nucleotide
gctggtacacggcagggtcagttttagagctagaaatagcaagttaaaataaggctagtccgttatcaacttgaaaaagtggcaccgagtcggtgctatccagaaccctgatagtgccctgccg

SEQ ID NO: 16457 - RNA, 131 nt, synthetic construct
  source 1..131: mol_type = other RNA
  modified_base 1: mod_base = OTHER; note = 2'-O-methyl modified nucleotide with phosphorothioate linkage
  modified_base 2: mod_base = OTHER; note = 2'-O-methyl modified nucleotide with phosphorothioate linkage
  modified_base 3: mod_base = OTHER; note = 2'-O-methyl modified nucleotide with phosphorothioate linkage
  modified_base 29: mod_base = OTHER; note = 2'-O-methyl modified nucleotide
  modified_base 30: mod_base = OTHER; note = 2'-O-methyl modified nucleotide
  modified_base 31: mod_base = OTHER; note = 2'-O-methyl modified nucleotide
  modified_base 32: mod_base = OTHER; note = 2'-O-methyl modified nucleotide
  modified_base 33: mod_base = OTHER; note = 2'-O-methyl modified nucleotide
  modified_base 34: mod_base = OTHER; note = 2'-O-methyl modified nucleotide
  modified_base 35: mod_base = OTHER; note = 2'-O-methyl modified nucleotide
  modified_base 36: mod_base = OTHER; note = 2'-O-methyl modified nucleotide
  modified_base 37: mod_base = OTHER; note = 2'-O-methyl modified nucleotide
  modified_base 38: mod_base = OTHER; note = 2'-O-methyl modified nucleotide
  modified_base 39: mod_base = OTHER; note = 2'-O-methyl modified nucleotide
  modified_base 40: mod_base = OTHER; note = 2'-O-methyl modified nucleotide
  modified_base 69: mod_base = OTHER; note = 2'-O-methyl modified nucleotide
  modified_base 70: mod_base = OTHER; note = 2'-O-methyl modified nucleotide
  modified_base 71: mod_base = OTHER; note = 2'-O-methyl modified nucleotide
  modified_base 72: mod_base = OTHER; note = 2'-O-methyl modified nucleotide
  modified_base 73: mod_base = OTHER; note = 2'-O-methyl modified nucleotide
  modified_base 74: mod_base = OTHER; note = 2'-O-methyl modified nucleotide
  modified_base 75: mod_base = OTHER; note = 2'-O-methyl modified nucleotide
  modified_base 76: mod_base = OTHER; note = 2'-O-methyl modified nucleotide
  modified_base 77: mod_base = OTHER; note = 2'-O-methyl modified nucleotide
  modified_base 78: mod_base = OTHER; note = 2'-O-methyl modified nucleotide
  modified_base 79: mod_base = OTHER; note = 2'-O-methyl modified nucleotide
  modified_base 80: mod_base = OTHER; note = 2'-O-methyl modified nucleotide
  modified_base 81: mod_base = OTHER; note = 2'-O-methyl modified nucleotide
  modified_base 82: mod_base = OTHER; note = 2'-O-methyl modified nucleotide
  modified_base 83: mod_base = OTHER; note = 2'-O-methyl modified nucleotide
  modified_base 84: mod_base = OTHER; note = 2'-O-methyl modified nucleotide
  modified_base 85: mod_base = OTHER; note = 2'-O-methyl modified nucleotide
  modified_base 86: mod_base = OTHER; note = 2'-O-methyl modified nucleotide
  modified_base 87: mod_base = OTHER; note = 2'-O-methyl modified nucleotide
  modified_base 88: mod_base = OTHER; note = 2'-O-methyl modified nucleotide
  modified_base 89: mod_base = OTHER; note = 2'-O-methyl modified nucleotide
  modified_base 90: mod_base = OTHER; note = 2'-O-methyl modified nucleotide
  modified_base 91: mod_base = OTHER; note = 2'-O-methyl modified nucleotide
  modified_base 92: mod_base = OTHER; note = 2'-O-methyl modified nucleotide
  modified_base 93: mod_base = OTHER; note = 2'-O-methyl modified nucleotide
  modified_base 94: mod_base = OTHER; note = 2'-O-methyl modified nucleotide
  modified_base 95: mod_base = OTHER; note = 2'-O-methyl modified nucleotide
  modified_base 96: mod_base = OTHER; note = 2'-O-methyl modified nucleotide
  modified_base 128: mod_base = OTHER; note = Nucleotide with phosphorothioate linkage
  modified_base 129: mod_base = OTHER; note = 2'-O-methyl modified nucleotide with phosphorothioate linkage
  modified_base 130: mod_base = OTHER; note = 2'-O-methyl modified nucleotide with phosphorothioate linkage
  modified_base 131: mod_base = OTHER; note = 2'-O-methyl modified nucleotide
gctggtacacggcagggtcagttttagagctagaaatagcaagttaaaataaggctagtccgttatcaacttgaaaaagtggcaccgagtcggtgcgatatccagaaccctgatagtgccctgccgtgtac

SEQ ID NO: 16458 - RNA, 130 nt, synthetic construct
  source 1..130: mol_type = other RNA
  modified_base 1: mod_base = OTHER; note = 2'-O-methyl modified nucleotide with phosphorothioate linkage
  modified_base 2: mod_base = OTHER; note = 2'-O-methyl modified nucleotide with phosphorothioate linkage
  modified_base 3: mod_base = OTHER; note = 2'-O-methyl modified nucleotide with phosphorothioate linkage
  modified_base 29: mod_base = OTHER; note = 2'-O-methyl modified nucleotide
  modified_base 30: mod_base = OTHER; note = 2'-O-methyl modified nucleotide
  modified_base 31: mod_base = OTHER; note = 2'-O-methyl modified nucleotide
  modified_base 32: mod_base = OTHER; note = 2'-O-methyl modified nucleotide
  modified_base 33: mod_base = OTHER; note = 2'-O-methyl modified nucleotide
  modified_base 34: mod_base = OTHER; note = 2'-O-methyl modified nucleotide
  modified_base 35: mod_base = OTHER; note = 2'-O-methyl modified nucleotide
  modified_base 36: mod_base = OTHER; note = 2'-O-methyl modified nucleotide
  modified_base 37: mod_base = OTHER; note = 2'-O-methyl modified nucleotide
  modified_base 38: mod_base = OTHER; note = 2'-O-methyl modified nucleotide
  modified_base 39: mod_base = OTHER; note = 2'-O-methyl modified nucleotide
  modified_base 40: mod_base = OTHER; note = 2'-O-methyl modified nucleotide
  modified_base 69: mod_base = OTHER; note = 2'-O-methyl modified nucleotide
  modified_base 70: mod_base = OTHER; note = 2'-O-methyl modified nucleotide
  modified_base 71: mod_base = OTHER; note = 2'-O-methyl modified nucleotide
  modified_base 72: mod_base = OTHER; note = 2'-O-methyl modified nucleotide
  modified_base 73: mod_base = OTHER; note = 2'-O-methyl modified nucleotide
  modified_base 74: mod_base = OTHER; note = 2'-O-methyl modified nucleotide
  modified_base 75: mod_base = OTHER; note = 2'-O-methyl modified nucleotide
  modified_base 76: mod_base = OTHER; note = 2'-O-methyl modified nucleotide
  modified_base 77: mod_base = OTHER; note = 2'-O-methyl modified nucleotide
  modified_base 78: mod_base = OTHER; note = 2'-O-methyl modified nucleotide
  modified_base 79: mod_base = OTHER; note = 2'-O-methyl modified nucleotide
  modified_base 80: mod_base = OTHER; note = 2'-O-methyl modified nucleotide
  modified_base 81: mod_base = OTHER; note = 2'-O-methyl modified nucleotide
  modified_base 82: mod_base = OTHER; note = 2'-O-methyl modified nucleotide
  modified_base 83: mod_base = OTHER; note = 2'-O-methyl modified nucleotide
  modified_base 84: mod_base = OTHER; note = 2'-O-methyl modified nucleotide
  modified_base 85: mod_base = OTHER; note = 2'-O-methyl modified nucleotide
  modified_base 86: mod_base = OTHER; note = 2'-O-methyl modified nucleotide
  modified_base 87: mod_base = OTHER; note = 2'-O-methyl modified nucleotide
  modified_base 88: mod_base = OTHER; note = 2'-O-methyl modified nucleotide
  modified_base 89: mod_base = OTHER; note = 2'-O-methyl modified nucleotide
  modified_base 90: mod_base = OTHER; note = 2'-O-methyl modified nucleotide
  modified_base 91: mod_base = OTHER; note = 2'-O-methyl modified nucleotide
  modified_base 92: mod_base = OTHER; note = 2'-O-methyl modified nucleotide
  modified_base 93: mod_base = OTHER; note = 2'-O-methyl modified nucleotide
  modified_base 94: mod_base = OTHER; note = 2'-O-methyl modified nucleotide
  modified_base 95: mod_base = OTHER; note = 2'-O-methyl modified nucleotide
  modified_base 96: mod_base = OTHER; note = 2'-O-methyl modified nucleotide
  modified_base 127: mod_base = OTHER; note = Nucleotide with phosphorothioate linkage
  modified_base 128: mod_base = OTHER; note = 2'-O-methyl modified nucleotide with phosphorothioate linkage
  modified_base 129: mod_base = OTHER; note = 2'-O-methyl modified nucleotide with phosphorothioate linkage
  modified_base 130: mod_base = OTHER; note = 2'-O-methyl modified nucleotide
gctggtacacggcagggtcagttttagagctagaaatagcaagttaaaataaggctagtccgttatcaacttgaaaaagtggcaccgagtcggtgcgatatccagaaccctgatagtgccctgccgtgta

SEQ ID NO: 16459 - RNA, 129 nt, synthetic construct
  source 1..129: mol_type = other RNA
  modified_base 1: mod_base = OTHER; note = 2'-O-methyl modified nucleotide with phosphorothioate linkage
  modified_base 2: mod_base = OTHER; note = 2'-O-methyl modified nucleotide with phosphorothioate linkage
  modified_base 3: mod_base = OTHER; note = 2'-O-methyl modified nucleotide with phosphorothioate linkage
  modified_base 29: mod_base = OTHER; note = 2'-O-methyl modified nucleotide
  modified_base 30: mod_base = OTHER; note = 2'-O-methyl modified nucleotide
  modified_base 31: mod_base = OTHER; note = 2'-O-methyl modified nucleotide
  modified_base 32: mod_base = OTHER; note = 2'-O-methyl modified nucleotide
  modified_base 33: mod_base = OTHER; note = 2'-O-methyl modified nucleotide
  modified_base 34: mod_base = OTHER; note = 2'-O-methyl modified nucleotide
  modified_base 35: mod_base = OTHER; note = 2'-O-methyl modified nucleotide
  modified_base 36: mod_base = OTHER; note = 2'-O-methyl modified nucleotide
  modified_base 37: mod_base = OTHER; note = 2'-O-methyl modified nucleotide
  modified_base 38: mod_base = OTHER; note = 2'-O-methyl modified nucleotide
  modified_base 39: mod_base = OTHER; note = 2'-O-methyl modified nucleotide
  modified_base 40: mod_base = OTHER; note = 2'-O-methyl modified nucleotide
  modified_base 69: mod_base = OTHER; note = 2'-O-methyl modified nucleotide
  modified_base 70: mod_base = OTHER; note = 2'-O-methyl modified nucleotide
  modified_base 71: mod_base = OTHER; note = 2'-O-methyl modified nucleotide
  modified_base 72: mod_base = OTHER; note = 2'-O-methyl modified nucleotide
  modified_base 73: mod_base = OTHER; note = 2'-O-methyl modified nucleotide
  modified_base 74: mod_base = OTHER; note = 2'-O-methyl modified nucleotide
  modified_base 75: mod_base = OTHER; note = 2'-O-methyl modified nucleotide
  modified_base 76: mod_base = OTHER; note = 2'-O-methyl modified nucleotide
  modified_base 77: mod_base = OTHER; note = 2'-O-methyl modified nucleotide
  modified_base 78: mod_base = OTHER; note = 2'-O-methyl modified nucleotide
  modified_base 79: mod_base = OTHER; note = 2'-O-methyl modified nucleotide
  modified_base 80: mod_base = OTHER; note = 2'-O-methyl modified nucleotide
  modified_base 81: mod_base = OTHER; note = 2'-O-methyl modified nucleotide
  modified_base 82: mod_base = OTHER; note = 2'-O-methyl modified nucleotide
  modified_base 83: mod_base = OTHER; note = 2'-O-methyl modified nucleotide
  modified_base 84: mod_base = OTHER; note = 2'-O-methyl modified nucleotide
  modified_base 85: mod_base = OTHER; note = 2'-O-methyl modified nucleotide
  modified_base 86: mod_base = OTHER; note = 2'-O-methyl modified nucleotide
  modified_base 87: mod_base = OTHER; note = 2'-O-methyl modified nucleotide
  modified_base 88: mod_base = OTHER; note = 2'-O-methyl modified nucleotide
  modified_base 89: mod_base = OTHER; note = 2'-O-methyl modified nucleotide
  modified_base 90: mod_base = OTHER; note = 2'-O-methyl modified nucleotide
  modified_base 91: mod_base = OTHER; note = 2'-O-methyl modified nucleotide
  modified_base 92: mod_base = OTHER; note = 2'-O-methyl modified nucleotide
  modified_base 93: mod_base = OTHER; note = 2'-O-methyl modified nucleotide
  modified_base 94: mod_base = OTHER; note = 2'-O-methyl modified nucleotide
  modified_base 95: mod_base = OTHER; note = 2'-O-methyl modified nucleotide
  modified_base 96: mod_base = OTHER; note = 2'-O-methyl modified nucleotide
  modified_base 126: mod_base = OTHER; note = Nucleotide with phosphorothioate linkage
  modified_base 127: mod_base = OTHER; note = 2'-O-methyl modified nucleotide with phosphorothioate linkage
  modified_base 128: mod_base = OTHER; note = 2'-O-methyl modified nucleotide with phosphorothioate linkage
  modified_base 129: mod_base = OTHER; note = 2'-O-methyl modified nucleotide
gctggtacacggcagggtcagttttagagctagaaatagcaagttaaaataaggctagtccgttatcaacttgaaaaagtggcaccgagtcggtgcgatatccagaaccctgatagtgccctgccgtgt

SEQ ID NO: 16460 - RNA, 128 nt, synthetic construct
  source 1..128: mol_type = other RNA
  modified_base 1: mod_base = OTHER; note = 2'-O-methyl modified nucleotide with phosphorothioate linkage
  modified_base 2: mod_base = OTHER; note = 2'-O-methyl modified nucleotide with phosphorothioate linkage
  modified_base 3: mod_base = OTHER; note = 2'-O-methyl modified nucleotide with phosphorothioate linkage
  modified_base 29: mod_base = OTHER; note = 2'-O-methyl modified nucleotide
  modified_base 30: mod_base = OTHER; note = 2'-O-methyl modified nucleotide
  modified_base 31: mod_base = OTHER; note = 2'-O-methyl modified nucleotide
  modified_base 32: mod_base = OTHER; note = 2'-O-methyl modified nucleotide
  modified_base 33: mod_base = OTHER; note = 2'-O-methyl modified nucleotide
  modified_base 34: mod_base = OTHER; note = 2'-O-methyl modified nucleotide
  modified_base 35: mod_base = OTHER; note = 2'-O-methyl modified nucleotide
  modified_base 36: mod_base = OTHER; note = 2'-O-methyl modified nucleotide
  modified_base 37: mod_base = OTHER; note = 2'-O-methyl modified nucleotide
  modified_base 38: mod_base = OTHER; note = 2'-O-methyl modified nucleotide
  modified_base 39: mod_base = OTHER; note = 2'-O-methyl modified nucleotide
  modified_base 40: mod_base = OTHER; note = 2'-O-methyl modified nucleotide
  modified_base 69: mod_base = OTHER; note = 2'-O-methyl modified nucleotide
  modified_base 70: mod_base = OTHER; note = 2'-O-methyl modified nucleotide
  modified_base 71: mod_base = OTHER; note = 2'-O-methyl modified nucleotide
  modified_base 72: mod_base = OTHER; note = 2'-O-methyl modified nucleotide
  modified_base 73: mod_base = OTHER; note = 2'-O-methyl modified nucleotide
  modified_base 74: mod_base = OTHER; note = 2'-O-methyl modified nucleotide
  modified_base 75: mod_base = OTHER; note = 2'-O-methyl modified nucleotide
  modified_base 76: mod_base = OTHER; note = 2'-O-methyl modified nucleotide
  modified_base 77: mod_base = OTHER; note = 2'-O-methyl modified nucleotide
  modified_base 78: mod_base = OTHER; note = 2'-O-methyl modified nucleotide
  modified_base 79: mod_base = OTHER; note = 2'-O-methyl modified nucleotide
  modified_base 80: mod_base = OTHER; note = 2'-O-methyl modified nucleotide
  modified_base 81: mod_base = OTHER; note = 2'-O-methyl modified nucleotide
  modified_base 82: mod_base = OTHER; note = 2'-O-methyl modified nucleotide
  modified_base 83: mod_base = OTHER; note = 2'-O-methyl modified nucleotide
  modified_base 84: mod_base = OTHER; note = 2'-O-methyl modified nucleotide
  modified_base 85: mod_base = OTHER; note = 2'-O-methyl modified nucleotide
  modified_base 86: mod_base = OTHER; note = 2'-O-methyl modified nucleotide
  modified_base 87: mod_base = OTHER; note = 2'-O-methyl modified nucleotide
  modified_base 88: mod_base = OTHER; note = 2'-O-methyl modified nucleotide
  modified_base 89: mod_base = OTHER; note = 2'-O-methyl modified nucleotide
  modified_base 90: mod_base = OTHER; note = 2'-O-methyl modified nucleotide
  modified_base 91: mod_base = OTHER; note = 2'-O-methyl modified nucleotide
  modified_base 92: mod_base = OTHER; note = 2'-O-methyl modified nucleotide
  modified_base 93: mod_base = OTHER; note = 2'-O-methyl modified nucleotide
  modified_base 94: mod_base = OTHER; note = 2'-O-methyl modified nucleotide
  modified_base 95: mod_base = OTHER; note = 2'-O-methyl modified nucleotide
  modified_base 96: mod_base = OTHER; note = 2'-O-methyl modified nucleotide
  modified_base 125: mod_base = OTHER; note = Nucleotide with phosphorothioate linkage
  modified_base 126: mod_base = OTHER; note = 2'-O-methyl modified nucleotide with phosphorothioate linkage
  modified_base 127: mod_base = OTHER; note = 2'-O-methyl modified nucleotide with phosphorothioate linkage
  modified_base 128: mod_base = OTHER; note = 2'-O-methyl modified nucleotide
gctggtacacggcagggtcagttttagagctagaaatagcaagttaaaataaggctagtccgttatcaacttgaaaaagtggcaccgagtcggtgcgatatccagaaccctgatagtgccctgccgtg

SEQ ID NO: 16461 - RNA, 127 nt, synthetic construct
  source 1..127: mol_type = other RNA
  modified_base 1: mod_base = OTHER; note = 2'-O-methyl modified nucleotide with phosphorothioate linkage
  modified_base 2: mod_base = OTHER; note = 2'-O-methyl modified nucleotide with phosphorothioate linkage
  modified_base 3: mod_base = OTHER; note = 2'-O-methyl modified nucleotide with phosphorothioate linkage
  modified_base 29: mod_base = OTHER; note = 2'-O-methyl modified nucleotide
  modified_base 30: mod_base = OTHER; note = 2'-O-methyl modified nucleotide
  modified_base 31: mod_base = OTHER; note = 2'-O-methyl modified nucleotide
  modified_base 32: mod_base = OTHER; note = 2'-O-methyl modified nucleotide
  modified_base 33: mod_base = OTHER; note = 2'-O-methyl modified nucleotide
  modified_base 34: mod_base = OTHER; note = 2'-O-methyl modified nucleotide
  modified_base 35: mod_base = OTHER; note = 2'-O-methyl modified nucleotide
  modified_base 36: mod_base = OTHER; note = 2'-O-methyl modified nucleotide
  modified_base 37: mod_base = OTHER; note = 2'-O-methyl modified nucleotide
  modified_base 38: mod_base = OTHER; note = 2'-O-methyl modified nucleotide
  modified_base 39: mod_base = OTHER; note = 2'-O-methyl modified nucleotide
  modified_base 40: mod_base = OTHER; note = 2'-O-methyl modified nucleotide
  modified_base 69: mod_base = OTHER; note = 2'-O-methyl modified nucleotide
  modified_base 70: mod_base = OTHER; note = 2'-O-methyl modified nucleotide
  modified_base 71: mod_base = OTHER; note = 2'-O-methyl modified nucleotide
  modified_base 72: mod_base = OTHER; note = 2'-O-methyl modified nucleotide
  modified_base 73: mod_base = OTHER; note = 2'-O-methyl modified nucleotide
  modified_base 74: mod_base = OTHER; note = 2'-O-methyl modified nucleotide
  modified_base 75: mod_base = OTHER; note = 2'-O-methyl modified nucleotide
  modified_base 76: mod_base = OTHER; note = 2'-O-methyl modified nucleotide
  modified_base 77: mod_base = OTHER; note = 2'-O-methyl modified nucleotide
  modified_base 78: mod_base = OTHER; note = 2'-O-methyl modified nucleotide
  modified_base 79: mod_base = OTHER; note = 2'-O-methyl modified nucleotide
  modified_base 80: mod_base = OTHER; note = 2'-O-methyl modified nucleotide
  modified_base 81: mod_base = OTHER; note = 2'-O-methyl modified nucleotide
  modified_base 82: mod_base = OTHER; note = 2'-O-methyl modified nucleotide
  modified_base 83: mod_base = OTHER; note = 2'-O-methyl modified nucleotide
  modified_base 84: mod_base = OTHER; note = 2'-O-methyl modified nucleotide
  modified_base 85: mod_base = OTHER; note = 2'-O-methyl modified nucleotide
  modified_base 86: mod_base = OTHER; note = 2'-O-methyl modified nucleotide
  modified_base 87: mod_base = OTHER; note = 2'-O-methyl modified nucleotide
  modified_base 88: mod_base = OTHER; note = 2'-O-methyl modified nucleotide
  modified_base 89: mod_base = OTHER; note = 2'-O-methyl modified nucleotide
  modified_base 90: mod_base = OTHER; note = 2'-O-methyl modified nucleotide
  modified_base 91: mod_base = OTHER; note = 2'-O-methyl modified nucleotide
  modified_base 92: mod_base = OTHER; note = 2'-O-methyl modified nucleotide
  modified_base 93: mod_base = OTHER; note = 2'-O-methyl modified nucleotide
  modified_base 94: mod_base = OTHER; note = 2'-O-methyl modified nucleotide
  modified_base 95: mod_base = OTHER; note = 2'-O-methyl modified nucleotide
  modified_base 96: mod_base = OTHER; note = 2'-O-methyl modified nucleotide
  modified_base 124: mod_base = OTHER; note = Nucleotide with phosphorothioate linkage
  modified_base 125: mod_base = OTHER; note = 2'-O-methyl modified nucleotide with phosphorothioate linkage
  modified_base 126: mod_base = OTHER; note = 2'-O-methyl modified nucleotide with phosphorothioate linkage
  modified_base 127: mod_base = OTHER; note = 2'-O-methyl modified nucleotide
gctggtacacggcagggtcagttttagagctagaaatagcaagttaaaataaggctagtccgttatcaacttgaaaaagtggcaccgagtcggtgcgatatccagaaccctgatagtgccctgccgt

SEQ ID NO: 16462 - RNA, 126 nt, synthetic construct
  source 1..126: mol_type = other RNA
  modified_base 1: mod_base = OTHER; note = 2'-O-methyl modified nucleotide with phosphorothioate linkage
  modified_base 2: mod_base = OTHER; note = 2'-O-methyl modified nucleotide with phosphorothioate linkage
  modified_base 3: mod_base = OTHER; note = 2'-O-methyl modified nucleotide with phosphorothioate linkage
  modified_base 29: mod_base = OTHER; note = 2'-O-methyl modified nucleotide
  modified_base 30: mod_base = OTHER; note = 2'-O-methyl modified nucleotide
  modified_base 31: mod_base = OTHER; note = 2'-O-methyl modified nucleotide
  modified_base 32: mod_base = OTHER; note = 2'-O-methyl modified nucleotide
  modified_base 33: mod_base = OTHER; note = 2'-O-methyl modified nucleotide
  modified_base 34: mod_base = OTHER; note = 2'-O-methyl modified nucleotide
  modified_base 35: mod_base = OTHER; note = 2'-O-methyl modified nucleotide
  modified_base 36: mod_base = OTHER; note = 2'-O-methyl modified nucleotide
  modified_base 37: mod_base = OTHER; note = 2'-O-methyl modified nucleotide
  modified_base 38: mod_base = OTHER; note = 2'-O-methyl modified nucleotide
  modified_base 39: mod_base = OTHER; note = 2'-O-methyl modified nucleotide
  modified_base 40: mod_base = OTHER; note = 2'-O-methyl modified nucleotide
  modified_base 69: mod_base = OTHER; note = 2'-O-methyl modified nucleotide
  modified_base 70: mod_base = OTHER; note = 2'-O-methyl modified nucleotide
  modified_base 71: mod_base = OTHER; note = 2'-O-methyl modified nucleotide
  modified_base 72: mod_base = OTHER; note = 2'-O-methyl modified nucleotide
  modified_base 73: mod_base = OTHER; note = 2'-O-methyl modified nucleotide
  modified_base 74: mod_base = OTHER; note = 2'-O-methyl modified nucleotide
  modified_base 75: mod_base = OTHER; note = 2'-O-methyl modified nucleotide
  modified_base 76: mod_base = OTHER; note = 2'-O-methyl modified nucleotide
  modified_base 77: mod_base = OTHER; note = 2'-O-methyl modified nucleotide
  modified_base 78: mod_base = OTHER; note = 2'-O-methyl modified nucleotide
  modified_base 79: mod_base = OTHER; note = 2'-O-methyl modified nucleotide
  modified_base 80: mod_base = OTHER; note = 2'-O-methyl modified nucleotide
  modified_base 81: mod_base = OTHER; note = 2'-O-methyl modified nucleotide
  modified_base 82: mod_base = OTHER; note = 2'-O-methyl modified nucleotide
  modified_base 83: mod_base = OTHER; note = 2'-O-methyl modified nucleotide
  modified_base 84: mod_base = OTHER; note = 2'-O-methyl modified nucleotide
  modified_base 85: mod_base = OTHER; note = 2'-O-methyl modified nucleotide
  modified_base 86: mod_base = OTHER; note = 2'-O-methyl modified nucleotide
  modified_base 87: mod_base = OTHER; note = 2'-O-methyl modified nucleotide
  modified_base 88: mod_base = OTHER; note = 2'-O-methyl modified nucleotide
  modified_base 89: mod_base = OTHER; note = 2'-O-methyl modified nucleotide
  modified_base 90: mod_base = OTHER; note = 2'-O-methyl modified nucleotide
  modified_base 91: mod_base = OTHER; note = 2'-O-methyl modified nucleotide
  modified_base 92: mod_base = OTHER; note = 2'-O-methyl modified nucleotide
  modified_base 93: mod_base = OTHER; note = 2'-O-methyl modified nucleotide
  modified_base 94: mod_base = OTHER; note = 2'-O-methyl modified nucleotide
  modified_base 95: mod_base = OTHER; note = 2'-O-methyl modified nucleotide
  modified_base 96: mod_base = OTHER; note = 2'-O-methyl modified nucleotide
  modified_base 123: mod_base = OTHER; note = Nucleotide with phosphorothioate linkage
  modified_base 124: mod_base = OTHER; note = 2'-O-methyl modified nucleotide with phosphorothioate linkage
  modified_base 125: mod_base = OTHER; note = 2'-O-methyl modified nucleotide with phosphorothioate linkage
  modified_base 126: mod_base = OTHER; note = 2'-O-methyl modified nucleotide
gctggtacacggcagggtcagttttagagctagaaatagcaagttaaaataaggctagtccgttatcaacttgaaaaagtggcaccgagtcggtgcgatatccagaaccctgatagtgccctgccg

SEQ ID NO: 16463 - RNA, 121 nt, synthetic construct
  source 1..121: mol_type = other RNA
  modified_base 1: mod_base = OTHER; note = 2'-O-methyl modified nucleotide with phosphorothioate linkage
  modified_base 2: mod_base = OTHER; note = 2'-O-methyl modified nucleotide with phosphorothioate linkage
  modified_base 3: mod_base = OTHER; note = 2'-O-methyl modified nucleotide with phosphorothioate linkage
  modified_base 29: mod_base = OTHER; note = 2'-O-methyl modified nucleotide
  modified_base 30: mod_base = OTHER; note = 2'-O-methyl modified nucleotide
  modified_base 31: mod_base = OTHER; note = 2'-O-methyl modified nucleotide
  modified_base 32: mod_base = OTHER; note = 2'-O-methyl modified nucleotide
  modified_base 33: mod_base = OTHER; note = 2'-O-methyl modified nucleotide
  modified_base 34: mod_base = OTHER; note = 2'-O-methyl modified nucleotide
  modified_base 35: mod_base = OTHER; note = 2'-O-methyl modified nucleotide
  modified_base 36: mod_base = OTHER; note = 2'-O-methyl modified nucleotide
  modified_base 37: mod_base = OTHER; note = 2'-O-methyl modified nucleotide
  modified_base 38: mod_base = OTHER; note = 2'-O-methyl modified nucleotide
  modified_base 39: mod_base = OTHER; note = 2'-O-methyl modified nucleotide
  modified_base 40: mod_base = OTHER; note = 2'-O-methyl modified nucleotide
  modified_base 69: mod_base = OTHER; note = 2'-O-methyl modified nucleotide
  modified_base 70: mod_base = OTHER; note = 2'-O-methyl modified nucleotide
  modified_base 71: mod_base = OTHER; note = 2'-O-methyl modified nucleotide
  modified_base 72: mod_base = OTHER; note = 2'-O-methyl modified nucleotide
  modified_base 73: mod_base = OTHER; note = 2'-O-methyl modified nucleotide
  modified_base 74: mod_base = OTHER; note = 2'-O-methyl modified nucleotide
  modified_base 75: mod_base = OTHER; note = 2'-O-methyl modified nucleotide
  modified_base 76: mod_base = OTHER; note = 2'-O-methyl modified nucleotide
  modified_base 77: mod_base = OTHER; note = 2'-O-methyl modified nucleotide
  modified_base 78: mod_base = OTHER; note = 2'-O-methyl modified nucleotide
  modified_base 79: mod_base = OTHER; note = 2'-O-methyl modified nucleotide
  modified_base 80: mod_base = OTHER; note = 2'-O-methyl modified nucleotide
  modified_base 81: mod_base = OTHER; note = 2'-O-methyl modified nucleotide
  modified_base 82: mod_base = OTHER; note = 2'-O-methyl modified nucleotide
  modified_base 83: mod_base = OTHER; note = 2'-O-methyl modified nucleotide
  modified_base 84: mod_base = OTHER; note = 2'-O-methyl modified nucleotide
  modified_base 85: mod_base = OTHER; note = 2'-O-methyl modified nucleotide
  modified_base 86: mod_base = OTHER; note = 2'-O-methyl modified nucleotide
  modified_base 87: mod_base = OTHER; note = 2'-O-methyl modified nucleotide
  modified_base 88: mod_base = OTHER; note = 2'-O-methyl modified nucleotide
  modified_base 89: mod_base = OTHER; note = 2'-O-methyl modified nucleotide
  modified_base 90: mod_base = OTHER; note = 2'-O-methyl modified nucleotide
  modified_base 91: mod_base = OTHER; note = 2'-O-methyl modified nucleotide
  modified_base 92: mod_base = OTHER; note = 2'-O-methyl modified nucleotide
  modified_base 93: mod_base = OTHER; note = 2'-O-methyl modified nucleotide
  modified_base 94: mod_base = OTHER; note = 2'-O-methyl modified nucleotide
  modified_base 95: mod_base = OTHER; note = 2'-O-methyl modified nucleotide
  modified_base 96: mod_base = OTHER; note = 2'-O-methyl modified nucleotide
  modified_base 118: mod_base = OTHER; note = Nucleotide with phosphorothioate linkage
  modified_base 119: mod_base = OTHER; note = 2'-O-methyl modified nucleotide with phosphorothioate linkage
  modified_base 120: mod_base = OTHER; note = 2'-O-methyl modified nucleotide with phosphorothioate linkage
  modified_base 121: mod_base = OTHER; note = 2'-O-methyl modified nucleotide
gctggtacacggcagggtcagttttagagctagaaatagcaagttaaaataaggctagtccgttatcaacttgaaaaagtggcaccgagtcggtgccctgatagttgaccctgccgtgtac

SEQ ID NO: 16464 - RNA, 120 nt, synthetic construct
  source 1..120: mol_type = other RNA
  modified_base 1: mod_base = OTHER; note = 2'-O-methyl modified nucleotide with phosphorothioate linkage
  modified_base 2: mod_base = OTHER; note = 2'-O-methyl modified nucleotide with phosphorothioate linkage
  modified_base 3: mod_base = OTHER; note = 2'-O-methyl modified nucleotide with phosphorothioate linkage
  modified_base 29: mod_base = OTHER; note = 2'-O-methyl modified nucleotide
  modified_base 30: mod_base = OTHER; note = 2'-O-methyl modified nucleotide
  modified_base 31: mod_base = OTHER; note = 2'-O-methyl modified nucleotide
  modified_base 32: mod_base = OTHER; note = 2'-O-methyl modified nucleotide
  modified_base 33: mod_base = OTHER; note = 2'-O-methyl modified nucleotide
  modified_base 34: mod_base = OTHER; note = 2'-O-methyl modified nucleotide
  modified_base 35: mod_base = OTHER; note = 2'-O-methyl modified nucleotide
  modified_base 36: mod_base = OTHER; note = 2'-O-methyl modified nucleotide
  modified_base 37: mod_base = OTHER; note = 2'-O-methyl modified nucleotide
  modified_base 38: mod_base = OTHER; note = 2'-O-methyl modified nucleotide
  modified_base 39: mod_base = OTHER; note = 2'-O-methyl modified nucleotide
  modified_base 40: mod_base = OTHER; note = 2'-O-methyl modified nucleotide
  modified_base 69: mod_base = OTHER; note = 2'-O-methyl modified nucleotide
  modified_base 70: mod_base = OTHER; note = 2'-O-methyl modified nucleotide
  modified_base 71: mod_base = OTHER; note = 2'-O-methyl modified nucleotide
  modified_base 72: mod_base = OTHER; note = 2'-O-methyl modified nucleotide
  modified_base 73: mod_base = OTHER; note = 2'-O-methyl modified nucleotide
  modified_base 74: mod_base = OTHER; note = 2'-O-methyl modified nucleotide
  modified_base 75: mod_base = OTHER; note = 2'-O-methyl modified nucleotide
  modified_base 76: mod_base = OTHER; note = 2'-O-methyl modified nucleotide
  modified_base 77: mod_base = OTHER; note = 2'-O-methyl modified nucleotide
  modified_base 78: mod_base = OTHER; note = 2'-O-methyl modified nucleotide
  modified_base 79: mod_base = OTHER; note = 2'-O-methyl modified nucleotide
  modified_base 80: mod_base = OTHER; note = 2'-O-methyl modified nucleotide
  modified_base 81: mod_base = OTHER; note = 2'-O-methyl modified nucleotide
  modified_base 82: mod_base = OTHER; note = 2'-O-methyl modified nucleotide
  modified_base 83: mod_base = OTHER; note = 2'-O-methyl modified nucleotide
  modified_base 84: mod_base = OTHER; note = 2'-O-methyl modified nucleotide
  modified_base 85: mod_base = OTHER; note = 2'-O-methyl modified nucleotide
  modified_base 86: mod_base = OTHER; note = 2'-O-methyl modified nucleotide
  modified_base 87: mod_base = OTHER; note = 2'-O-methyl modified nucleotide
  modified_base 88: mod_base = OTHER; note = 2'-O-methyl modified nucleotide
  modified_base 89: mod_base = OTHER; note = 2'-O-methyl modified nucleotide
  modified_base 90: mod_base = OTHER; note = 2'-O-methyl modified nucleotide
  modified_base 91: mod_base = OTHER; note = 2'-O-methyl modified nucleotide
  modified_base 92: mod_base = OTHER; note = 2'-O-methyl modified nucleotide
  modified_base 93: mod_base = OTHER; note = 2'-O-methyl modified nucleotide
  modified_base 94: mod_base = OTHER; note = 2'-O-methyl modified nucleotide
  modified_base 95: mod_base = OTHER; note = 2'-O-methyl modified nucleotide
  modified_base 96: mod_base = OTHER; note = 2'-O-methyl modified nucleotide
  modified_base 117: mod_base = OTHER; note = Nucleotide with phosphorothioate linkage
  modified_base 118: mod_base = OTHER; note = 2'-O-methyl modified nucleotide with phosphorothioate linkage
  modified_base 119: mod_base = OTHER; note = 2'-O-methyl modified nucleotide with phosphorothioate linkage
  modified_base 120: mod_base = OTHER; note = 2'-O-methyl modified nucleotide
gctggtacacggcagggtcagttttagagctagaaatagcaagttaaaataaggctagtccgttatcaacttgaaaaagtggcaccgagtcggtgccctgatagttgaccctgccgtgta

SEQ ID NO: 16465 - RNA, 119 nt, synthetic construct
  source 1..119: mol_type = other RNA
  modified_base 1: mod_base = OTHER; note = 2'-O-methyl modified nucleotide with phosphorothioate linkage
  modified_base 2: mod_base = OTHER; note = 2'-O-methyl modified nucleotide with phosphorothioate linkage
  modified_base 3: mod_base = OTHER; note = 2'-O-methyl modified nucleotide with phosphorothioate linkage
  modified_base 29: mod_base = OTHER; note = 2'-O-methyl modified nucleotide
  modified_base 30: mod_base = OTHER; note = 2'-O-methyl modified nucleotide
  modified_base 31: mod_base = OTHER; note = 2'-O-methyl modified nucleotide
  modified_base 32: mod_base = OTHER; note = 2'-O-methyl modified nucleotide
  modified_base 33: mod_base = OTHER; note = 2'-O-methyl modified nucleotide
  modified_base 34: mod_base = OTHER; note = 2'-O-methyl modified nucleotide
  modified_base 35: mod_base = OTHER; note = 2'-O-methyl modified nucleotide
  modified_base 36: mod_base = OTHER; note = 2'-O-methyl modified nucleotide
  modified_base 37: mod_base = OTHER; note = 2'-O-methyl modified nucleotide
  modified_base 38: mod_base = OTHER; note = 2'-O-methyl modified nucleotide
  modified_base 39: mod_base = OTHER; note = 2'-O-methyl modified nucleotide
  modified_base 40: mod_base = OTHER; note = 2'-O-methyl modified nucleotide
  modified_base 69: mod_base = OTHER; note = 2'-O-methyl modified nucleotide
  modified_base 70: mod_base = OTHER; note = 2'-O-methyl modified nucleotide
  modified_base 71: mod_base = OTHER; note = 2'-O-methyl modified nucleotide
  modified_base 72: mod_base = OTHER; note = 2'-O-methyl modified nucleotide
  modified_base 73: mod_base = OTHER; note = 2'-O-methyl modified nucleotide
  modified_base 74: mod_base = OTHER; note = 2'-O-methyl modified nucleotide
  modified_base 75: mod_base = OTHER; note = 2'-O-methyl modified nucleotide
  modified_base 76: mod_base = OTHER; note = 2'-O-methyl modified nucleotide
  modified_base 77: mod_base = OTHER; note = 2'-O-methyl modified nucleotide
  modified_base 78: mod_base = OTHER; note = 2'-O-methyl modified nucleotide
  modified_base 79: mod_base = OTHER; note = 2'-O-methyl modified nucleotide
  modified_base 80: mod_base = OTHER; note = 2'-O-methyl modified nucleotide
  modified_base 81: mod_base = OTHER; note = 2'-O-methyl modified nucleotide
  modified_base 82: mod_base = OTHER; note = 2'-O-methyl modified nucleotide
  modified_base 83: mod_base = OTHER; note = 2'-O-methyl modified nucleotide
  modified_base 84: mod_base = OTHER; note = 2'-O-methyl modified nucleotide
  modified_base 85: mod_base = OTHER; note = 2'-O-methyl modified nucleotide
  modified_base 86: mod_base = OTHER; note = 2'-O-methyl modified nucleotide
  modified_base 87: mod_base = OTHER; note = 2'-O-methyl modified nucleotide
  modified_base 88: mod_base = OTHER; note = 2'-O-methyl modified nucleotide
  modified_base 89: mod_base = OTHER; note = 2'-O-methyl modified nucleotide
  modified_base 90: mod_base = OTHER; note = 2'-O-methyl modified nucleotide
  modified_base 91: mod_base = OTHER; note = 2'-O-methyl modified nucleotide
  modified_base 92: mod_base = OTHER; note = 2'-O-methyl modified nucleotide
  modified_base 93: mod_base = OTHER; note = 2'-O-methyl modified nucleotide
  modified_base 94: mod_base = OTHER; note = 2'-O-methyl modified nucleotide
  modified_base 95: mod_base = OTHER; note = 2'-O-methyl modified nucleotide
  modified_base 96: mod_base = OTHER; note = 2'-O-methyl modified nucleotide
  modified_base 116: mod_base = OTHER; note = Nucleotide with phosphorothioate linkage
  modified_base 117: mod_base = OTHER; note = 2'-O-methyl modified nucleotide with phosphorothioate linkage
  modified_base 118: mod_base = OTHER; note = 2'-O-methyl modified nucleotide with phosphorothioate linkage
  modified_base 119: mod_base = OTHER; note = 2'-O-methyl modified nucleotide
gctggtacacggcagggtcagttttagagctagaaatagcaagttaaaataaggctagtccgttatcaacttgaaaaagtggcaccgagtcggtgccctgatagttgaccctgccgtgt

SEQ ID NO: 16466 - RNA, 118 nt, synthetic construct
  source 1..118: mol_type = other RNA
  modified_base 1: mod_base = OTHER; note = 2'-O-methyl modified nucleotide with phosphorothioate linkage
  modified_base 2: mod_base = OTHER; note = 2'-O-methyl modified nucleotide with phosphorothioate linkage
  modified_base 3: mod_base = OTHER; note = 2'-O-methyl modified nucleotide with phosphorothioate linkage
  modified_base 29: mod_base = OTHER; note = 2'-O-methyl modified nucleotide
  modified_base 30: mod_base = OTHER; note = 2'-O-methyl modified nucleotide
  modified_base 31: mod_base = OTHER; note = 2'-O-methyl modified nucleotide
  modified_base 32: mod_base = OTHER; note = 2'-O-methyl modified nucleotide
  modified_base 33: mod_base = OTHER; note = 2'-O-methyl modified nucleotide
  modified_base 34: mod_base = OTHER; note = 2'-O-methyl modified nucleotide
  modified_base 35: mod_base = OTHER; note = 2'-O-methyl modified nucleotide
  modified_base 36: mod_base = OTHER; note = 2'-O-methyl modified nucleotide
  modified_base 37: mod_base = OTHER; note = 2'-O-methyl modified nucleotide
  modified_base 38: mod_base = OTHER; note = 2'-O-methyl modified nucleotide
  modified_base 39: mod_base = OTHER; note = 2'-O-methyl modified nucleotide
  modified_base 40: mod_base = OTHER; note = 2'-O-methyl modified nucleotide
  modified_base 69: mod_base = OTHER; note = 2'-O-methyl modified nucleotide
  modified_base 70: mod_base = OTHER; note = 2'-O-methyl modified nucleotide
  modified_base 71: mod_base = OTHER; note = 2'-O-methyl modified nucleotide
  modified_base 72: mod_base = OTHER; note = 2'-O-methyl modified nucleotide
  modified_base 73: mod_base = OTHER; note = 2'-O-methyl modified nucleotide
  modified_base 74: mod_base = OTHER; note = 2'-O-methyl modified nucleotide
  modified_base 75: mod_base = OTHER; note = 2'-O-methyl modified nucleotide
  modified_base 76: mod_base = OTHER; note = 2'-O-methyl modified nucleotide
  modified_base 77: mod_base = OTHER; note = 2'-O-methyl modified nucleotide
  modified_base 78: mod_base = OTHER; note = 2'-O-methyl modified nucleotide
  modified_base 79: mod_base = OTHER; note = 2'-O-methyl modified nucleotide
  modified_base 80: mod_base = OTHER; note = 2'-O-methyl modified nucleotide
  modified_base 81: mod_base = OTHER; note = 2'-O-methyl modified nucleotide
  modified_base 82: mod_base = OTHER; note = 2'-O-methyl modified nucleotide
  modified_base 83: mod_base = OTHER; note = 2'-O-methyl modified nucleotide
  modified_base 84: mod_base = OTHER; note = 2'-O-methyl modified nucleotide
  modified_base 85: mod_base = OTHER; note = 2'-O-methyl modified nucleotide
  modified_base 86: mod_base = OTHER; note = 2'-O-methyl modified nucleotide
  modified_base 87: mod_base = OTHER; note = 2'-O-methyl modified nucleotide
  modified_base 88: mod_base = OTHER; note = 2'-O-methyl modified nucleotide
  modified_base 89: mod_base = OTHER; note = 2'-O-methyl modified nucleotide
  modified_base 90: mod_base = OTHER; note = 2'-O-methyl modified nucleotide
  modified_base 91: mod_base = OTHER; note = 2'-O-methyl modified nucleotide
  modified_base 92: mod_base = OTHER; note = 2'-O-methyl modified nucleotide
  modified_base 93: mod_base = OTHER; note = 2'-O-methyl modified nucleotide
  modified_base 94: mod_base = OTHER; note = 2'-O-methyl modified nucleotide
  modified_base 95: mod_base = OTHER; note = 2'-O-methyl modified nucleotide
  modified_base 96: mod_base = OTHER; note = 2'-O-methyl modified nucleotide
  modified_base 115: mod_base = OTHER; note = Nucleotide with phosphorothioate linkage
  modified_base 116: mod_base = OTHER; note = 2'-O-methyl modified nucleotide with phosphorothioate linkage
  modified_base 117: mod_base = OTHER; note = 2'-O-methyl modified nucleotide with phosphorothioate linkage
  modified_base 118: mod_base = OTHER; note = 2'-O-methyl modified nucleotide
gctggtacacggcagggtcagttttagagctagaaatagcaagttaaaataaggctagtccgttatcaacttgaaaaagtggcaccgagtcggtgccctgatagttgaccctgccgtg

SEQ ID NO: 16467 - RNA, 117 nt, synthetic construct
  source 1..117: mol_type = other RNA
  modified_base 1: mod_base = OTHER; note = 2'-O-methyl modified nucleotide with phosphorothioate linkage
  modified_base 2: mod_base = OTHER; note = 2'-O-methyl modified nucleotide with phosphorothioate linkage
  modified_base 3: mod_base = OTHER; note = 2'-O-methyl modified nucleotide with phosphorothioate linkage
  modified_base 29: mod_base = OTHER; note = 2'-O-methyl modified nucleotide
  modified_base 30: mod_base = OTHER; note = 2'-O-methyl modified nucleotide
  modified_base 31: mod_base = OTHER; note = 2'-O-methyl modified nucleotide
  modified_base 32: mod_base = OTHER; note = 2'-O-methyl modified nucleotide
  modified_base 33: mod_base = OTHER; note = 2'-O-methyl modified nucleotide
  modified_base 34: mod_base = OTHER; note = 2'-O-methyl modified nucleotide
  modified_base 35: mod_base = OTHER; note = 2'-O-methyl modified nucleotide
  modified_base 36: mod_base = OTHER; note = 2'-O-methyl modified nucleotide
  modified_base 37: mod_base = OTHER; note = 2'-O-methyl modified nucleotide
  modified_base 38: mod_base = OTHER; note = 2'-O-methyl modified nucleotide
  modified_base 39: mod_base = OTHER; note = 2'-O-methyl modified nucleotide
  modified_base 40: mod_base = OTHER; note = 2'-O-methyl modified nucleotide
  modified_base 69: mod_base = OTHER; note = 2'-O-methyl modified nucleotide
  modified_base 70: mod_base = OTHER; note = 2'-O-methyl modified nucleotide
  modified_base 71: mod_base = OTHER; note = 2'-O-methyl modified nucleotide
  modified_base 72: mod_base = OTHER; note = 2'-O-methyl modified nucleotide
  modified_base 73: mod_base = OTHER; note = 2'-O-methyl modified nucleotide
  modified_base 74: mod_base = OTHER; note = 2'-O-methyl modified nucleotide
  modified_base 75: mod_base = OTHER; note = 2'-O-methyl modified nucleotide
  modified_base 76: mod_base = OTHER; note = 2'-O-methyl modified nucleotide
  modified_base 77: mod_base = OTHER; note = 2'-O-methyl modified nucleotide
  modified_base 78: mod_base = OTHER; note = 2'-O-methyl modified nucleotide
  modified_base 79: mod_base = OTHER; note = 2'-O-methyl modified nucleotide
  modified_base 80: mod_base = OTHER; note = 2'-O-methyl modified nucleotide
  modified_base 81: mod_base = OTHER; note = 2'-O-methyl modified nucleotide
  modified_base 82: mod_base = OTHER; note = 2'-O-methyl modified nucleotide
  modified_base 83: mod_base = OTHER; note = 2'-O-methyl modified nucleotide
  modified_base 84: mod_base = OTHER; note = 2'-O-methyl modified nucleotide
  modified_base 85: mod_base = OTHER; note = 2'-O-methyl modified nucleotide
  modified_base 86: mod_base = OTHER; note = 2'-O-methyl modified nucleotide
  modified_base 87: mod_base = OTHER; note = 2'-O-methyl modified nucleotide
  modified_base 88: mod_base = OTHER; note = 2'-O-methyl modified nucleotide
  modified_base 89: mod_base = OTHER; note = 2'-O-methyl modified nucleotide
  modified_base 90: mod_base = OTHER; note = 2'-O-methyl modified nucleotide
  modified_base 91: mod_base = OTHER; note = 2'-O-methyl modified nucleotide
  modified_base 92: mod_base = OTHER; note = 2'-O-methyl modified nucleotide
  modified_base 93: mod_base = OTHER; note = 2'-O-methyl modified nucleotide
  modified_base 94: mod_base = OTHER; note = 2'-O-methyl modified nucleotide
  modified_base 95: mod_base = OTHER; note = 2'-O-methyl modified nucleotide
  modified_base 96: mod_base = OTHER; note = 2'-O-methyl modified nucleotide
  modified_base 114: mod_base = OTHER; note = Nucleotide with phosphorothioate linkage
  modified_base 115: mod_base = OTHER; note = 2'-O-methyl modified nucleotide with phosphorothioate linkage
  modified_base 116: mod_base = OTHER; note = 2'-O-methyl modified nucleotide with phosphorothioate linkage
  modified_base 117: mod_base = OTHER; note = 2'-O-methyl modified nucleotide
gctggtacacggcagggtcagttttagagctagaaatagcaagttaaaataaggctagtccgttatcaacttgaaaaagtggcaccgagtcggtgccctgatagttgaccctgccgt

SEQ ID NO: 16468 - RNA, 116 nt, synthetic construct
  source 1..116: mol_type = other RNA
  modified_base 1: mod_base = OTHER; note = 2'-O-methyl modified nucleotide with phosphorothioate linkage
  modified_base 2: mod_base = OTHER; note = 2'-O-methyl modified nucleotide with phosphorothioate linkage
  modified_base 3: mod_base = OTHER; note = 2'-O-methyl modified nucleotide with phosphorothioate linkage
  modified_base 29: mod_base = OTHER; note = 2'-O-methyl modified nucleotide
  modified_base 30: mod_base = OTHER; note = 2'-O-methyl modified nucleotide
  modified_base 31: mod_base = OTHER; note = 2'-O-methyl modified nucleotide
  modified_base 32: mod_base = OTHER; note = 2'-O-methyl modified nucleotide
  modified_base 33: mod_base = OTHER; note = 2'-O-methyl modified nucleotide
  modified_base 34: mod_base = OTHER; note = 2'-O-methyl modified nucleotide
  modified_base 35: mod_base = OTHER; note = 2'-O-methyl modified nucleotide
  modified_base 36: mod_base = OTHER; note = 2'-O-methyl modified nucleotide
  modified_base 37: mod_base = OTHER; note = 2'-O-methyl modified nucleotide
  modified_base 38: mod_base = OTHER; note = 2'-O-methyl modified nucleotide
  modified_base 39: mod_base = OTHER; note = 2'-O-methyl modified nucleotide
  modified_base 40: mod_base = OTHER; note = 2'-O-methyl modified nucleotide
  modified_base 69: mod_base = OTHER; note = 2'-O-methyl modified nucleotide
  modified_base 70: mod_base = OTHER; note = 2'-O-methyl modified nucleotide
  modified_base 71: mod_base = OTHER; note = 2'-O-methyl modified nucleotide
  modified_base 72: mod_base = OTHER; note = 2'-O-methyl modified nucleotide
  modified_base 73: mod_base = OTHER; note = 2'-O-methyl modified nucleotide
  modified_base 74: mod_base = OTHER; note = 2'-O-methyl modified nucleotide
  modified_base 75: mod_base = OTHER; note = 2'-O-methyl modified nucleotide
  modified_base 76: mod_base = OTHER; note = 2'-O-methyl modified nucleotide
  modified_base 77: mod_base = OTHER; note = 2'-O-methyl modified nucleotide
  modified_base 78: mod_base = OTHER; note = 2'-O-methyl modified nucleotide
  modified_base 79: mod_base = OTHER; note = 2'-O-methyl modified nucleotide
  modified_base 80: mod_base = OTHER; note = 2'-O-methyl modified nucleotide
  modified_base 81: mod_base = OTHER; note = 2'-O-methyl modified nucleotide
  modified_base 82: mod_base = OTHER; note = 2'-O-methyl modified nucleotide
  modified_base 83: mod_base = OTHER; note = 2'-O-methyl modified nucleotide
  modified_base 84: mod_base = OTHER; note = 2'-O-methyl modified nucleotide
  modified_base 85: mod_base = OTHER; note = 2'-O-methyl modified nucleotide
  modified_base 86: mod_base = OTHER; note = 2'-O-methyl modified nucleotide
  modified_base 87: mod_base = OTHER; note = 2'-O-methyl modified nucleotide
  modified_base 88: mod_base = OTHER; note = 2'-O-methyl modified nucleotide
  modified_base 89: mod_base = OTHER; note = 2'-O-methyl modified nucleotide
  modified_base 90: mod_base = OTHER; note = 2'-O-methyl modified nucleotide
  modified_base 91: mod_base = OTHER; note = 2'-O-methyl modified nucleotide
  modified_base 92: mod_base = OTHER; note = 2'-O-methyl modified nucleotide
  modified_base 93: mod_base = OTHER; note = 2'-O-methyl modified nucleotide
  modified_base 94: mod_base = OTHER; note = 2'-O-methyl modified nucleotide
  modified_base 95: mod_base = OTHER; note = 2'-O-methyl modified nucleotide
  modified_base 96: mod_base = OTHER; note = 2'-O-methyl modified nucleotide
  modified_base 113: mod_base = OTHER; note = Nucleotide with phosphorothioate linkage
  modified_base 114: mod_base = OTHER; note = 2'-O-methyl modified nucleotide with phosphorothioate linkage
  modified_base 115: mod_base = OTHER; note = 2'-O-methyl modified nucleotide with phosphorothioate linkage
  modified_base 116: mod_base = OTHER; note = 2'-O-methyl modified nucleotide
gctggtacacggcagggtcagttttagagctagaaatagcaagttaaaataaggctagtccgttatcaacttgaaaaagtggcaccgagtcggtgccctgatagttgaccctgccg

SEQ ID NO: 16469 - RNA, 123 nt, synthetic construct
  source 1..123: mol_type = other RNA
  modified_base 1: mod_base = OTHER; note = 2'-O-methyl modified nucleotide with phosphorothioate linkage
  modified_base 2: mod_base = OTHER; note = 2'-O-methyl modified nucleotide with phosphorothioate linkage
  modified_base 3: mod_base = OTHER; note = 2'-O-methyl modified nucleotide with phosphorothioate linkage
  modified_base 29: mod_base = OTHER; note = 2'-O-methyl modified nucleotide
  modified_base 30: mod_base = OTHER; note = 2'-O-methyl modified nucleotide
  modified_base 31: mod_base = OTHER; note = 2'-O-methyl modified nucleotide
  modified_base 32: mod_base = OTHER; note = 2'-O-methyl modified nucleotide
  modified_base 33: mod_base = OTHER; note = 2'-O-methyl modified nucleotide
  modified_base 34: mod_base = OTHER; note = 2'-O-methyl modified nucleotide
  modified_base 35: mod_base = OTHER; note = 2'-O-methyl modified nucleotide
  modified_base 36: mod_base = OTHER; note = 2'-O-methyl modified nucleotide
  modified_base 37: mod_base = OTHER; note = 2'-O-methyl modified nucleotide
  modified_base 38: mod_base = OTHER; note = 2'-O-methyl modified nucleotide
  modified_base 39: mod_base = OTHER; note = 2'-O-methyl modified nucleotide
  modified_base 40: mod_base = OTHER; note = 2'-O-methyl modified nucleotide
  modified_base 69: mod_base = OTHER; note = 2'-O-methyl modified nucleotide
  modified_base 70: mod_base = OTHER; note = 2'-O-methyl modified nucleotide
  modified_base 71: mod_base = OTHER; note = 2'-O-methyl modified nucleotide
  modified_base 72: mod_base = OTHER; note = 2'-O-methyl modified nucleotide
  modified_base 73: mod_base = OTHER; note = 2'-O-methyl modified nucleotide
  modified_base 74: mod_base = OTHER; note = 2'-O-methyl modified nucleotide
  modified_base 75: mod_base = OTHER; note = 2'-O-methyl modified nucleotide
  modified_base 76: mod_base = OTHER; note = 2'-O-methyl modified nucleotide
  modified_base 77: mod_base = OTHER; note = 2'-O-methyl modified nucleotide
  modified_base 78: mod_base = OTHER; note = 2'-O-methyl modified nucleotide
  modified_base 79: mod_base = OTHER; note = 2'-O-methyl modified nucleotide
  modified_base 80: mod_base = OTHER; note = 2'-O-methyl modified nucleotide
  modified_base 81: mod_base = OTHER; note = 2'-O-methyl modified nucleotide
  modified_base 82: mod_base = OTHER; note = 2'-O-methyl modified nucleotide
  modified_base 83: mod_base = OTHER; note = 2'-O-methyl modified nucleotide
  modified_base 84: mod_base = OTHER; note = 2'-O-methyl modified nucleotide
  modified_base 85: mod_base = OTHER; note = 2'-O-methyl modified nucleotide
  modified_base 86: mod_base = OTHER; note = 2'-O-methyl modified nucleotide
  modified_base 87: mod_base = OTHER; note = 2'-O-methyl modified nucleotide
  modified_base 88: mod_base = OTHER; note = 2'-O-methyl modified nucleotide
  modified_base 89: mod_base = OTHER; note = 2'-O-methyl modified nucleotide
  modified_base 90: mod_base = OTHER; note = 2'-O-methyl modified nucleotide
  modified_base 91: mod_base = OTHER; note = 2'-O-methyl modified nucleotide
  modified_base 92: mod_base = OTHER; note = 2'-O-methyl modified nucleotide
  modified_base 93: mod_base = OTHER; note = 2'-O-methyl modified nucleotide
  modified_base 94: mod_base = OTHER; note = 2'-O-methyl modified nucleotide
  modified_base 95: mod_base = OTHER; note = 2'-O-methyl modified nucleotide
  modified_base 96: mod_base = OTHER; note = 2'-O-methyl modified nucleotide
  modified_base 120: mod_base = OTHER; note = Nucleotide with phosphorothioate linkage
  modified_base 121: mod_base = OTHER; note = 2'-O-methyl modified nucleotide with phosphorothioate linkage
  modified_base 122: mod_base = OTHER; note = 2'-O-methyl modified nucleotide with phosphorothioate linkage
  modified_base 123: mod_base = OTHER; note = 2'-O-methyl modified nucleotide
gctggtacacggcagggtcagttttagagctagaaatagcaagttaaaataaggctagtccgttatcaacttgaaaaagtggcaccgagtcggtgcaccctgatagttgaccctgccgtgtac

SEQ ID NO: 16470 - RNA, 122 nt, synthetic construct
  source 1..122: mol_type = other RNA
  modified_base 1: mod_base = OTHER; note = 2'-O-methyl modified nucleotide with phosphorothioate linkage
  modified_base 2: mod_base = OTHER; note = 2'-O-methyl modified nucleotide with phosphorothioate linkage
  modified_base 3: mod_base = OTHER; note = 2'-O-methyl modified nucleotide with phosphorothioate linkage
  modified_base 29: mod_base = OTHER; note = 2'-O-methyl modified nucleotide
  modified_base 30: mod_base = OTHER; note = 2'-O-methyl modified nucleotide
  modified_base 31: mod_base = OTHER; note = 2'-O-methyl modified nucleotide
  modified_base 32: mod_base = OTHER; note = 2'-O-methyl modified nucleotide
  modified_base 33: mod_base = OTHER; note = 2'-O-methyl modified nucleotide
  modified_base 34: mod_base = OTHER; note = 2'-O-methyl modified nucleotide
  modified_base 35: mod_base = OTHER; note = 2'-O-methyl modified nucleotide
  modified_base 36: mod_base = OTHER; note = 2'-O-methyl modified nucleotide
  modified_base 37: mod_base = OTHER; note = 2'-O-methyl modified nucleotide
  modified_base 38: mod_base = OTHER; note = 2'-O-methyl modified nucleotide
  modified_base 39: mod_base = OTHER; note = 2'-O-methyl modified nucleotide
  modified_base 40: mod_base = OTHER; note = 2'-O-methyl modified nucleotide
  modified_base 69: mod_base = OTHER; note = 2'-O-methyl modified nucleotide
  modified_base 70: mod_base = OTHER; note = 2'-O-methyl modified nucleotide
  modified_base 71: mod_base = OTHER; note = 2'-O-methyl modified nucleotide
  modified_base 72: mod_base = OTHER; note = 2'-O-methyl modified nucleotide
  modified_base 73: mod_base = OTHER; note = 2'-O-methyl modified nucleotide
  modified_base 74: mod_base = OTHER; note = 2'-O-methyl modified nucleotide
  modified_base 75: mod_base = OTHER; note = 2'-O-methyl modified nucleotide
  modified_base 76: mod_base = OTHER; note = 2'-O-methyl modified nucleotide
  modified_base 77: mod_base = OTHER; note = 2'-O-methyl modified nucleotide
  modified_base 78: mod_base = OTHER; note = 2'-O-methyl modified nucleotide
  modified_base 79: mod_base = OTHER; note = 2'-O-methyl modified nucleotide
  modified_base 80: mod_base = OTHER; note = 2'-O-methyl modified nucleotide
  modified_base 81: mod_base = OTHER; note = 2'-O-methyl modified nucleotide
  modified_base 82: mod_base = OTHER; note = 2'-O-methyl modified nucleotide
  modified_base 83: mod_base = OTHER; note = 2'-O-methyl modified nucleotide
  modified_base 84: mod_base = OTHER; note = 2'-O-methyl modified nucleotide
  modified_base 85: mod_base = OTHER; note = 2'-O-methyl modified nucleotide
  modified_base 86: mod_base = OTHER; note = 2'-O-methyl modified nucleotide
  modified_base 87: mod_base = OTHER; note = 2'-O-methyl modified nucleotide
  modified_base 88: mod_base = OTHER; note = 2'-O-methyl modified nucleotide
  modified_base 89: mod_base = OTHER; note = 2'-O-methyl modified nucleotide
  modified_base 90: mod_base = OTHER; note = 2'-O-methyl modified nucleotide
  modified_base 91: mod_base = OTHER; note = 2'-O-methyl modified nucleotide
  modified_base 92: mod_base = OTHER; note = 2'-O-methyl modified nucleotide
  modified_base 93: mod_base = OTHER; note = 2'-O-methyl modified nucleotide
  modified_base 94: mod_base = OTHER; note = 2'-O-methyl modified nucleotide
  modified_base 95: mod_base = OTHER; note = 2'-O-methyl modified nucleotide
  modified_base 96: mod_base = OTHER; note = 2'-O-methyl modified nucleotide
  modified_base 119: mod_base = OTHER; note = Nucleotide with phosphorothioate linkage
  modified_base 120: mod_base = OTHER; note = 2'-O-methyl modified nucleotide with phosphorothioate linkage
  modified_base 121: mod_base = OTHER; note = 2'-O-methyl modified nucleotide with phosphorothioate linkage
  modified_base 122: mod_base = OTHER; note = 2'-O-methyl modified nucleotide
gctggtacacggcagggtcagttttagagctagaaatagcaagttaaaataaggctagtccgttatcaacttgaaaaagtggcaccgagtcggtgcaccctgatagttgaccctgccgtgta

SEQ ID NO: 16471 - RNA, 121 nt, synthetic construct
  source 1..121: mol_type = other RNA
  modified_base 1: mod_base = OTHER; note = 2'-O-methyl modified nucleotide with phosphorothioate linkage
  modified_base 2: mod_base = OTHER; note = 2'-O-methyl modified nucleotide with phosphorothioate linkage
  modified_base 3: mod_base = OTHER; note = 2'-O-methyl modified nucleotide with phosphorothioate linkage
  modified_base 29: mod_base = OTHER; note = 2'-O-methyl modified nucleotide
  modified_base 30: mod_base = OTHER; note = 2'-O-methyl modified nucleotide
  modified_base 31: mod_base = OTHER; note = 2'-O-methyl modified nucleotide
  modified_base 32: mod_base = OTHER; note = 2'-O-methyl modified nucleotide
  modified_base 33: mod_base = OTHER; note = 2'-O-methyl modified nucleotide
  modified_base 34: mod_base = OTHER; note = 2'-O-methyl modified nucleotide
  modified_base 35: mod_base = OTHER; note = 2'-O-methyl modified nucleotide
  modified_base 36: mod_base = OTHER; note = 2'-O-methyl modified nucleotide
  modified_base 37: mod_base = OTHER; note = 2'-O-methyl modified nucleotide
  modified_base 38: mod_base = OTHER; note = 2'-O-methyl modified nucleotide
  modified_base 39: mod_base = OTHER; note = 2'-O-methyl modified nucleotide
  modified_base 40: mod_base = OTHER; note = 2'-O-methyl modified nucleotide
  modified_base 69: mod_base = OTHER; note = 2'-O-methyl modified nucleotide
  modified_base 70: mod_base = OTHER; note = 2'-O-methyl modified nucleotide
  modified_base 71: mod_base = OTHER; note = 2'-O-methyl modified nucleotide
  modified_base 72: mod_base = OTHER; note = 2'-O-methyl modified nucleotide
  modified_base 73: mod_base = OTHER; note = 2'-O-methyl modified nucleotide
  modified_base 74: mod_base = OTHER; note = 2'-O-methyl modified nucleotide
  modified_base 75: mod_base = OTHER; note = 2'-O-methyl modified nucleotide
  modified_base 76: mod_base = OTHER; note = 2'-O-methyl modified nucleotide
  modified_base 77: mod_base = OTHER; note = 2'-O-methyl modified nucleotide
  modified_base 78: mod_base = OTHER; note = 2'-O-methyl modified nucleotide
  modified_base 79: mod_base = OTHER; note = 2'-O-methyl modified nucleotide
  modified_base 80: mod_base = OTHER; note = 2'-O-methyl modified nucleotide
  modified_base 81: mod_base = OTHER; note = 2'-O-methyl modified nucleotide
  modified_base 82: mod_base = OTHER; note = 2'-O-methyl modified nucleotide
  modified_base 83: mod_base = OTHER; note = 2'-O-methyl modified nucleotide
  modified_base 84: mod_base = OTHER; note = 2'-O-methyl modified nucleotide
  modified_base 85: mod_base = OTHER; note = 2'-O-methyl modified nucleotide
  modified_base 86: mod_base = OTHER; note = 2'-O-methyl modified nucleotide
  modified_base 87: mod_base = OTHER; note = 2'-O-methyl modified nucleotide
  modified_base 88: mod_base = OTHER; note = 2'-O-methyl modified nucleotide
  modified_base 89: mod_base = OTHER; note = 2'-O-methyl modified nucleotide
  modified_base 90: mod_base = OTHER; note = 2'-O-methyl modified nucleotide
  modified_base 91: mod_base = OTHER; note = 2'-O-methyl modified nucleotide
  modified_base 92: mod_base = OTHER; note = 2'-O-methyl modified nucleotide
  modified_base 93: mod_base = OTHER; note = 2'-O-methyl modified nucleotide
  modified_base 94: mod_base = OTHER; note = 2'-O-methyl modified nucleotide
  modified_base 95: mod_base = OTHER; note = 2'-O-methyl modified nucleotide
  modified_base 96: mod_base = OTHER; note = 2'-O-methyl modified nucleotide
  modified_base 118: mod_base = OTHER; note = Nucleotide with phosphorothioate linkage
  modified_base 119: mod_base = OTHER; note = 2'-O-methyl modified nucleotide with phosphorothioate linkage
  modified_base 120: mod_base = OTHER; note = 2'-O-methyl modified nucleotide with phosphorothioate linkage
  modified_base 121: mod_base = OTHER; note = 2'-O-methyl modified nucleotide
gctggtacacggcagggtcagttttagagctagaaatagcaagttaaaataaggctagtccgttatcaacttgaaaaagtggcaccgagtcggtgcaccctgatagttgaccctgccgtgt

SEQ ID NO: 16472 - RNA, 120 nt, synthetic construct
  source 1..120: mol_type = other RNA
  modified_base 1: mod_base = OTHER; note = 2'-O-methyl modified nucleotide with phosphorothioate linkage
  modified_base 2: mod_base = OTHER; note = 2'-O-methyl modified nucleotide with phosphorothioate linkage
  modified_base 3: mod_base = OTHER; note = 2'-O-methyl modified nucleotide with phosphorothioate linkage
  modified_base 29: mod_base = OTHER; note = 2'-O-methyl modified nucleotide
  modified_base 30: mod_base = OTHER; note = 2'-O-methyl modified nucleotide
  modified_base 31: mod_base = OTHER; note = 2'-O-methyl modified nucleotide
  modified_base 32: mod_base = OTHER; note = 2'-O-methyl modified nucleotide
  modified_base 33: mod_base = OTHER; note = 2'-O-methyl modified nucleotide
  modified_base 34: mod_base = OTHER; note = 2'-O-methyl modified nucleotide
  modified_base 35: mod_base = OTHER; note = 2'-O-methyl modified nucleotide
  modified_base 36: mod_base = OTHER; note = 2'-O-methyl modified nucleotide
  modified_base 37: mod_base = OTHER; note = 2'-O-methyl modified nucleotide
  modified_base 38: mod_base = OTHER; note = 2'-O-methyl modified nucleotide
  modified_base 39: mod_base = OTHER; note = 2'-O-methyl modified nucleotide
  modified_base 40: mod_base = OTHER; note = 2'-O-methyl modified nucleotide
  modified_base 69: mod_base = OTHER; note = 2'-O-methyl modified nucleotide
  modified_base 70: mod_base = OTHER; note = 2'-O-methyl modified nucleotide
  modified_base 71: mod_base = OTHER; note = 2'-O-methyl modified nucleotide
  modified_base 72: mod_base = OTHER; note = 2'-O-methyl modified nucleotide
  modified_base 73: mod_base = OTHER; note = 2'-O-methyl modified nucleotide
  modified_base 74: mod_base = OTHER; note = 2'-O-methyl modified nucleotide
  modified_base 75: mod_base = OTHER; note = 2'-O-methyl modified nucleotide
  modified_base 76: mod_base = OTHER; note = 2'-O-methyl modified nucleotide
  modified_base 77: mod_base = OTHER; note = 2'-O-methyl modified nucleotide
  modified_base 78: mod_base = OTHER; note = 2'-O-methyl modified nucleotide
  modified_base 79: mod_base = OTHER; note = 2'-O-methyl modified nucleotide
  modified_base 80: mod_base = OTHER; note = 2'-O-methyl modified nucleotide
  modified_base 81: mod_base = OTHER; note = 2'-O-methyl modified nucleotide
  modified_base 82: mod_base = OTHER; note = 2'-O-methyl modified nucleotide
  modified_base 83: mod_base = OTHER; note = 2'-O-methyl modified nucleotide
  modified_base 84: mod_base = OTHER; note = 2'-O-methyl modified nucleotide
  modified_base 85: mod_base = OTHER; note = 2'-O-methyl modified nucleotide
  modified_base 86: mod_base = OTHER; note = 2'-O-methyl modified nucleotide
  modified_base 87: mod_base = OTHER; note = 2'-O-methyl modified nucleotide
  modified_base 88: mod_base = OTHER; note = 2'-O-methyl modified nucleotide
  modified_base 89: mod_base = OTHER; note = 2'-O-methyl modified nucleotide
  modified_base 90: mod_base = OTHER; note = 2'-O-methyl modified nucleotide
  modified_base 91: mod_base = OTHER; note = 2'-O-methyl modified nucleotide
  modified_base 92: mod_base = OTHER; note = 2'-O-methyl modified nucleotide
  modified_base 93: mod_base = OTHER; note = 2'-O-methyl modified nucleotide
  modified_base 94: mod_base = OTHER; note = 2'-O-methyl modified nucleotide
  modified_base 95: mod_base = OTHER; note = 2'-O-methyl modified nucleotide
  modified_base 96: mod_base = OTHER; note = 2'-O-methyl modified nucleotide
  modified_base 117: mod_base = OTHER; note = Nucleotide with phosphorothioate linkage
  modified_base 118: mod_base = OTHER; note = 2'-O-methyl modified nucleotide with phosphorothioate linkage
  modified_base 119: mod_base = OTHER; note = 2'-O-methyl modified nucleotide with phosphorothioate linkage
  modified_base 120: mod_base = OTHER; note = 2'-O-methyl modified nucleotide
gctggtacacggcagggtcagttttagagctagaaatagcaagttaaaataaggctagtccgttatcaacttgaaaaagtggcaccgagtcggtgcaccctgatagttgaccctgccgtg

SEQ ID NO: 16473 - RNA, 119 nt, synthetic construct
  source 1..119: mol_type = other RNA
  modified_base 1: mod_base = OTHER; note = 2'-O-methyl modified nucleotide with phosphorothioate linkage
  modified_base 2: mod_base = OTHER; note = 2'-O-methyl modified nucleotide with phosphorothioate linkage
  modified_base 3: mod_base = OTHER; note = 2'-O-methyl modified nucleotide with phosphorothioate linkage
  modified_base 29: mod_base = OTHER; note = 2'-O-methyl modified nucleotide
  modified_base 30: mod_base = OTHER; note = 2'-O-methyl modified nucleotide
  modified_base 31: mod_base = OTHER; note = 2'-O-methyl modified nucleotide
  modified_base 32: mod_base = OTHER; note = 2'-O-methyl modified nucleotide
  modified_base 33: mod_base = OTHER; note = 2'-O-methyl modified nucleotide
  modified_base 34: mod_base = OTHER; note = 2'-O-methyl modified nucleotide
  modified_base 35: mod_base = OTHER; note = 2'-O-methyl modified nucleotide
  modified_base 36: mod_base = OTHER; note = 2'-O-methyl modified nucleotide
  modified_base 37: mod_base = OTHER; note = 2'-O-methyl modified nucleotide
  modified_base 38: mod_base = OTHER; note = 2'-O-methyl modified nucleotide
  modified_base 39: mod_base = OTHER; note = 2'-O-methyl modified nucleotide
  modified_base 40: mod_base = OTHER; note = 2'-O-methyl modified nucleotide
  modified_base 69: mod_base = OTHER; note = 2'-O-methyl modified nucleotide
  modified_base 70: mod_base = OTHER; note = 2'-O-methyl modified nucleotide
  modified_base 71: mod_base = OTHER; note = 2'-O-methyl modified nucleotide
  modified_base 72: mod_base = OTHER; note = 2'-O-methyl modified nucleotide
  modified_base 73: mod_base = OTHER; note = 2'-O-methyl modified nucleotide
  modified_base 74: mod_base = OTHER; note = 2'-O-methyl modified nucleotide
  modified_base 75: mod_base = OTHER; note = 2'-O-methyl modified nucleotide
  modified_base 76: mod_base = OTHER; note = 2'-O-methyl modified nucleotide
  modified_base 77: mod_base = OTHER; note = 2'-O-methyl modified nucleotide
  modified_base 78: mod_base = OTHER; note = 2'-O-methyl modified nucleotide
  modified_base 79: mod_base = OTHER; note = 2'-O-methyl modified nucleotide
  modified_base 80: mod_base = OTHER; note = 2'-O-methyl modified nucleotide
  modified_base 81: mod_base = OTHER; note = 2'-O-methyl modified nucleotide
  modified_base 82: mod_base = OTHER; note = 2'-O-methyl modified nucleotide
  modified_base 83: mod_base = OTHER; note = 2'-O-methyl modified nucleotide
  modified_base 84: mod_base = OTHER; note = 2'-O-methyl modified nucleotide
  modified_base 85: mod_base = OTHER; note = 2'-O-methyl modified nucleotide
  modified_base 86: mod_base = OTHER; note = 2'-O-methyl modified nucleotide
  modified_base 87: mod_base = OTHER; note = 2'-O-methyl modified nucleotide
  modified_base 88: mod_base = OTHER; note = 2'-O-methyl modified nucleotide
  modified_base 89: mod_base = OTHER; note = 2'-O-methyl modified nucleotide
  modified_base 90: mod_base = OTHER; note = 2'-O-methyl modified nucleotide
  modified_base 91: mod_base = OTHER; note = 2'-O-methyl modified nucleotide
  modified_base 92: mod_base = OTHER; note = 2'-O-methyl modified nucleotide
  modified_base 93: mod_base = OTHER; note = 2'-O-methyl modified nucleotide
  modified_base 94: mod_base = OTHER; note = 2'-O-methyl modified nucleotide
  modified_base 95: mod_base = OTHER; note = 2'-O-methyl modified nucleotide
  modified_base 96: mod_base = OTHER; note = 2'-O-methyl modified nucleotide
  modified_base 116: mod_base = OTHER; note = Nucleotide with phosphorothioate linkage
  modified_base 117: mod_base = OTHER; note = 2'-O-methyl modified nucleotide with phosphorothioate linkage
  modified_base 118: mod_base = OTHER; note = 2'-O-methyl modified nucleotide with phosphorothioate linkage
  modified_base 119: mod_base = OTHER; note = 2'-O-methyl modified nucleotide
gctggtacacggcagggtcagttttagagctagaaatagcaagttaaaataaggctagtccgttatcaacttgaaaaagtggcaccgagtcggtgcaccctgatagttgaccctgccgt

SEQ ID NO: 16474 - RNA, 118 nt, synthetic construct
  source 1..118: mol_type = other RNA
  modified_base 1: mod_base = OTHER; note = 2'-O-methyl modified nucleotide with phosphorothioate linkage
  modified_base 2: mod_base = OTHER; note = 2'-O-methyl modified nucleotide with phosphorothioate linkage
  modified_base 3: mod_base = OTHER; note = 2'-O-methyl modified nucleotide with phosphorothioate linkage
  modified_base 29: mod_base = OTHER; note = 2'-O-methyl modified nucleotide
  modified_base 30: mod_base = OTHER; note = 2'-O-methyl modified nucleotide
  modified_base 31: mod_base = OTHER; note = 2'-O-methyl modified nucleotide
  modified_base 32: mod_base = OTHER; note = 2'-O-methyl modified nucleotide
  modified_base 33: mod_base = OTHER; note = 2'-O-methyl modified nucleotide
  modified_base 34: mod_base = OTHER; note = 2'-O-methyl modified nucleotide
  modified_base 35: mod_base = OTHER; note = 2'-O-methyl modified nucleotide
  modified_base 36: mod_base = OTHER; note = 2'-O-methyl modified nucleotide
  modified_base 37: mod_base = OTHER; note = 2'-O-methyl modified nucleotide
  modified_base 38: mod_base = OTHER; note = 2'-O-methyl modified nucleotide
  modified_base 39: mod_base = OTHER; note = 2'-O-methyl modified nucleotide
  modified_base 40: mod_base = OTHER; note = 2'-O-methyl modified nucleotide
  modified_base 69: mod_base = OTHER; note = 2'-O-methyl modified nucleotide
  modified_base 70: mod_base = OTHER; note = 2'-O-methyl modified nucleotide
  modified_base 71: mod_base = OTHER; note = 2'-O-methyl modified nucleotide
  modified_base 72: mod_base = OTHER; note = 2'-O-methyl modified nucleotide
  modified_base 73: mod_base = OTHER; note = 2'-O-methyl modified nucleotide
  modified_base 74: mod_base = OTHER; note = 2'-O-methyl modified nucleotide
  modified_base 75: mod_base = OTHER; note = 2'-O-methyl modified nucleotide
  modified_base 76: mod_base = OTHER; note = 2'-O-methyl modified nucleotide
  modified_base 77: mod_base = OTHER; note = 2'-O-methyl modified nucleotide
  modified_base 78: mod_base = OTHER; note = 2'-O-methyl modified nucleotide
  modified_base 79: mod_base = OTHER; note = 2'-O-methyl modified nucleotide
  modified_base 80: mod_base = OTHER; note = 2'-O-methyl modified nucleotide
  modified_base 81: mod_base = OTHER; note = 2'-O-methyl modified nucleotide
  modified_base 82: mod_base = OTHER; note = 2'-O-methyl modified nucleotide
  modified_base 83: mod_base = OTHER; note = 2'-O-methyl modified nucleotide
  modified_base 84: mod_base = OTHER; note = 2'-O-methyl modified nucleotide
  modified_base 85: mod_base = OTHER; note = 2'-O-methyl modified nucleotide
  modified_base 86: mod_base = OTHER; note = 2'-O-methyl modified nucleotide
  modified_base 87: mod_base = OTHER; note = 2'-O-methyl modified nucleotide
  modified_base 88: mod_base = OTHER; note = 2'-O-methyl modified nucleotide
  modified_base 89: mod_base = OTHER; note = 2'-O-methyl modified nucleotide
  modified_base 90: mod_base = OTHER; note = 2'-O-methyl modified nucleotide
  modified_base 91: mod_base = OTHER; note = 2'-O-methyl modified nucleotide
  modified_base 92: mod_base = OTHER; note = 2'-O-methyl modified nucleotide
  modified_base 93: mod_base = OTHER; note = 2'-O-methyl modified nucleotide
  modified_base 94: mod_base = OTHER; note = 2'-O-methyl modified nucleotide
  modified_base 95: mod_base = OTHER; note = 2'-O-methyl modified nucleotide
  modified_base 96: mod_base = OTHER; note = 2'-O-methyl modified nucleotide
  modified_base 115: mod_base = OTHER; note = Nucleotide with phosphorothioate linkage
  modified_base 116: mod_base = OTHER; note = 2'-O-methyl modified nucleotide with phosphorothioate linkage
  modified_base 117: mod_base = OTHER; note = 2'-O-methyl modified nucleotide with phosphorothioate linkage
  modified_base 118: mod_base = OTHER; note = 2'-O-methyl modified nucleotide
gctggtacacggcagggtcagttttagagctagaaatagcaagttaaaataaggctagtccgttatcaacttgaaaaagtggcaccgagtcggtgcaccctgatagttgaccctgccg

SEQ ID NO: 16475 - RNA, 125 nt, synthetic construct
  source 1..125: mol_type = other RNA
  modified_base 1: mod_base = OTHER; note = 2'-O-methyl modified nucleotide with phosphorothioate linkage
  modified_base 2: mod_base = OTHER; note = 2'-O-methyl modified nucleotide with phosphorothioate linkage
  modified_base 3: mod_base = OTHER; note = 2'-O-methyl modified nucleotide with phosphorothioate linkage
  modified_base 29: mod_base = OTHER; note = 2'-O-methyl modified nucleotide
  modified_base 30: mod_base = OTHER; note = 2'-O-methyl modified nucleotide
  modified_base 31: mod_base = OTHER; note = 2'-O-methyl modified nucleotide
  modified_base 32: mod_base = OTHER; note = 2'-O-methyl modified nucleotide
  modified_base 33: mod_base = OTHER; note = 2'-O-methyl modified nucleotide
  modified_base 34: mod_base = OTHER; note = 2'-O-methyl modified nucleotide
  modified_base 35: mod_base = OTHER; note = 2'-O-methyl modified nucleotide
  modified_base 36: mod_base = OTHER; note = 2'-O-methyl modified nucleotide
  modified_base 37: mod_base = OTHER; note = 2'-O-methyl modified nucleotide
  modified_base 38: mod_base = OTHER; note = 2'-O-methyl modified nucleotide
  modified_base 39: mod_base = OTHER; note = 2'-O-methyl modified nucleotide
  modified_base 40: mod_base = OTHER; note = 2'-O-methyl modified nucleotide
  modified_base 69: mod_base = OTHER; note = 2'-O-methyl modified nucleotide
  modified_base 70: mod_base = OTHER; note = 2'-O-methyl modified nucleotide
  modified_base 71: mod_base = OTHER; note = 2'-O-methyl modified nucleotide
  modified_base 72: mod_base = OTHER; note = 2'-O-methyl modified nucleotide
  modified_base 73: mod_base = OTHER; note = 2'-O-methyl modified nucleotide
  modified_base 74: mod_base = OTHER; note = 2'-O-methyl modified nucleotide
  modified_base 75: mod_base = OTHER; note = 2'-O-methyl modified nucleotide
  modified_base 76: mod_base = OTHER; note = 2'-O-methyl modified nucleotide
  modified_base 77: mod_base = OTHER; note = 2'-O-methyl modified nucleotide
  modified_base 78: mod_base = OTHER; note = 2'-O-methyl modified nucleotide
  modified_base 79: mod_base = OTHER; note = 2'-O-methyl modified nucleotide
  modified_base 80: mod_base = OTHER; note = 2'-O-methyl modified nucleotide
  modified_base 81: mod_base = OTHER; note = 2'-O-methyl modified nucleotide
  modified_base 82: mod_base = OTHER; note = 2'-O-methyl modified nucleotide
  modified_base 83: mod_base = OTHER; note = 2'-O-methyl modified nucleotide
  modified_base 84: mod_base = OTHER; note = 2'-O-methyl modified nucleotide
  modified_base 85: mod_base = OTHER; note = 2'-O-methyl modified nucleotide
  modified_base 86: mod_base = OTHER; note = 2'-O-methyl modified nucleotide
  modified_base 87: mod_base = OTHER; note = 2'-O-methyl modified nucleotide
  modified_base 88: mod_base = OTHER; note = 2'-O-methyl modified nucleotide
  modified_base 89: mod_base = OTHER; note = 2'-O-methyl modified nucleotide
  modified_base 90: mod_base = OTHER; note = 2'-O-methyl modified nucleotide
  modified_base 91: mod_base = OTHER; note = 2'-O-methyl modified nucleotide
  modified_base 92: mod_base = OTHER; note = 2'-O-methyl modified nucleotide
  modified_base 93: mod_base = OTHER; note = 2'-O-methyl modified nucleotide
  modified_base 94: mod_base = OTHER; note = 2'-O-methyl modified nucleotide
  modified_base 95: mod_base = OTHER; note = 2'-O-methyl modified nucleotide
  modified_base 96: mod_base = OTHER; note = 2'-O-methyl modified nucleotide
  modified_base 122: mod_base = OTHER; note = Nucleotide with phosphorothioate linkage
  modified_base 123: mod_base = OTHER; note = 2'-O-methyl modified nucleotide with phosphorothioate linkage
  modified_base 124: mod_base = OTHER; note = 2'-O-methyl modified nucleotide with phosphorothioate linkage
  modified_base 125: mod_base = OTHER; note = 2'-O-methyl modified nucleotide
gctggtacacggcagggtcagttttagagctagaaatagcaagttaaaataaggctagtccgttatcaacttgaaaaagtggcaccgagtcggtgcgaaccctgatagttgaccctgccgtgtac

SEQ ID NO: 16476 - RNA, 124 nt, synthetic construct
  source 1..124: mol_type = other RNA
  modified_base 1: mod_base = OTHER; note = 2'-O-methyl modified nucleotide with phosphorothioate linkage
  modified_base 2: mod_base = OTHER; note = 2'-O-methyl modified nucleotide with phosphorothioate linkage
  modified_base 3: mod_base = OTHER; note = 2'-O-methyl modified nucleotide with phosphorothioate linkage
  modified_base 29: mod_base = OTHER; note = 2'-O-methyl modified nucleotide
  modified_base 30: mod_base = OTHER; note = 2'-O-methyl modified nucleotide
  modified_base 31: mod_base = OTHER; note = 2'-O-methyl modified nucleotide
  modified_base 32: mod_base = OTHER; note = 2'-O-methyl modified nucleotide
  modified_base 33: mod_base = OTHER; note = 2'-O-methyl modified nucleotide
  modified_base 34: mod_base = OTHER; note = 2'-O-methyl modified nucleotide
  modified_base 35: mod_base = OTHER; note = 2'-O-methyl modified nucleotide
  modified_base 36: mod_base = OTHER; note = 2'-O-methyl modified nucleotide
  modified_base 37: mod_base = OTHER; note = 2'-O-methyl modified nucleotide
  modified_base 38: mod_base = OTHER; note = 2'-O-methyl modified nucleotide
  modified_base 39: mod_base = OTHER; note = 2'-O-methyl modified nucleotide
  modified_base 40: mod_base = OTHER; note = 2'-O-methyl modified nucleotide
  modified_base 69: mod_base = OTHER; note = 2'-O-methyl modified nucleotide
  modified_base 70: mod_base = OTHER; note = 2'-O-methyl modified nucleotide
  modified_base 71: mod_base = OTHER; note = 2'-O-methyl modified nucleotide
  modified_base 72: mod_base = OTHER; note = 2'-O-methyl modified nucleotide
  modified_base 73: mod_base = OTHER; note = 2'-O-methyl modified nucleotide
  modified_base 74: mod_base = OTHER; note = 2'-O-methyl modified nucleotide
  modified_base 75: mod_base = OTHER; note = 2'-O-methyl modified nucleotide
  modified_base 76: mod_base = OTHER; note = 2'-O-methyl modified nucleotide
  modified_base 77: mod_base = OTHER; note = 2'-O-methyl modified nucleotide
  modified_base 78: mod_base = OTHER; note = 2'-O-methyl modified nucleotide
  modified_base 79: mod_base = OTHER; note = 2'-O-methyl modified nucleotide
  modified_base 80: mod_base = OTHER; note = 2'-O-methyl modified nucleotide
  modified_base 81: mod_base = OTHER; note = 2'-O-methyl modified nucleotide
  modified_base 82: mod_base = OTHER; note = 2'-O-methyl modified nucleotide
  modified_base 83: mod_base = OTHER; note = 2'-O-methyl modified nucleotide
  modified_base 84: mod_base = OTHER; note = 2'-O-methyl modified nucleotide
  modified_base 85: mod_base = OTHER; note = 2'-O-methyl modified nucleotide
  modified_base 86: mod_base = OTHER; note = 2'-O-methyl modified nucleotide
  modified_base 87: mod_base = OTHER; note = 2'-O-methyl modified nucleotide
  modified_base 88: mod_base = OTHER; note = 2'-O-methyl modified nucleotide
  modified_base 89: mod_base = OTHER; note = 2'-O-methyl modified nucleotide
  modified_base 90: mod_base = OTHER; note = 2'-O-methyl modified nucleotide
  modified_base 91: mod_base = OTHER; note = 2'-O-methyl modified nucleotide
  modified_base 92: mod_base = OTHER; note = 2'-O-methyl modified nucleotide
  modified_base 93: mod_base = OTHER; note = 2'-O-methyl modified nucleotide
  modified_base 94: mod_base = OTHER; note = 2'-O-methyl modified nucleotide
  modified_base 95: mod_base = OTHER; note = 2'-O-methyl modified nucleotide
  modified_base 96: mod_base = OTHER; note = 2'-O-methyl modified nucleotide
  modified_base 121: mod_base = OTHER; note = Nucleotide with phosphorothioate linkage
  modified_base 122: mod_base = OTHER; note = 2'-O-methyl modified nucleotide with phosphorothioate linkage
  modified_base 123: mod_base = OTHER; note = 2'-O-methyl modified nucleotide with phosphorothioate linkage
  modified_base 124: mod_base = OTHER; note = 2'-O-methyl modified nucleotide
gctggtacacggcagggtcagttttagagctagaaatagcaagttaaaataaggctagtccgttatcaacttgaaaaagtggcaccgagtcggtgcgaaccctgatagttgaccctgccgtgta

SEQ ID NO: 16477 - RNA, 123 nt, synthetic construct
  source 1..123: mol_type = other RNA
  modified_base 1: mod_base = OTHER; note = 2'-O-methyl modified nucleotide with phosphorothioate linkage
  modified_base 2: mod_base = OTHER; note = 2'-O-methyl modified nucleotide with phosphorothioate linkage
  modified_base 3: mod_base = OTHER; note = 2'-O-methyl modified nucleotide with phosphorothioate linkage
  modified_base 29: mod_base = OTHER; note = 2'-O-methyl modified nucleotide
  modified_base 30: mod_base = OTHER; note = 2'-O-methyl modified nucleotide
  modified_base 31: mod_base = OTHER; note = 2'-O-methyl modified nucleotide
  modified_base 32: mod_base = OTHER; note = 2'-O-methyl modified nucleotide
  modified_base 33: mod_base = OTHER; note = 2'-O-methyl modified nucleotide
  modified_base 34: mod_base = OTHER; note = 2'-O-methyl modified nucleotide
  modified_base 35: mod_base = OTHER; note = 2'-O-methyl modified nucleotide
  modified_base 36: mod_base = OTHER; note = 2'-O-methyl modified nucleotide
  modified_base 37: mod_base = OTHER; note = 2'-O-methyl modified nucleotide
  modified_base 38: mod_base = OTHER; note = 2'-O-methyl modified nucleotide
  modified_base 39: mod_base = OTHER; note = 2'-O-methyl modified nucleotide
  modified_base 40: mod_base = OTHER; note = 2'-O-methyl modified nucleotide
  modified_base 69: mod_base = OTHER; note = 2'-O-methyl modified nucleotide
  modified_base 70: mod_base = OTHER; note = 2'-O-methyl modified nucleotide
  modified_base 71: mod_base = OTHER; note = 2'-O-methyl modified nucleotide
  modified_base 72: mod_base = OTHER; note = 2'-O-methyl modified nucleotide
  modified_base 73: mod_base = OTHER; note = 2'-O-methyl modified nucleotide
  modified_base 74: mod_base = OTHER; note = 2'-O-methyl modified nucleotide
  modified_base 75: mod_base = OTHER; note = 2'-O-methyl modified nucleotide
  modified_base 76: mod_base = OTHER; note = 2'-O-methyl modified nucleotide
  modified_base 77: mod_base = OTHER; note = 2'-O-methyl modified nucleotide
  modified_base 78: mod_base = OTHER; note = 2'-O-methyl modified nucleotide
  modified_base 79: mod_base = OTHER; note = 2'-O-methyl modified nucleotide
  modified_base 80: mod_base = OTHER; note = 2'-O-methyl modified nucleotide
  modified_base 81: mod_base = OTHER; note = 2'-O-methyl modified nucleotide
  modified_base 82: mod_base = OTHER; note = 2'-O-methyl modified nucleotide
  modified_base 83: mod_base = OTHER; note = 2'-O-methyl modified nucleotide
  modified_base 84: mod_base = OTHER; note = 2'-O-methyl modified nucleotide
  modified_base 85: mod_base = OTHER; note = 2'-O-methyl modified nucleotide
  modified_base 86: mod_base = OTHER; note = 2'-O-methyl modified nucleotide
  modified_base 87: mod_base = OTHER; note = 2'-O-methyl modified nucleotide
  modified_base 88: mod_base = OTHER; note = 2'-O-methyl modified nucleotide
  modified_base 89: mod_base = OTHER; note = 2'-O-methyl modified nucleotide
  modified_base 90: mod_base = OTHER; note = 2'-O-methyl modified nucleotide
  modified_base 91: mod_base = OTHER; note = 2'-O-methyl modified nucleotide
  modified_base 92: mod_base = OTHER; note = 2'-O-methyl modified nucleotide
  modified_base 93: mod_base = OTHER; note = 2'-O-methyl modified nucleotide
  modified_base 94: mod_base = OTHER; note = 2'-O-methyl modified nucleotide
  modified_base 95: mod_base = OTHER; note = 2'-O-methyl modified nucleotide
  modified_base 96: mod_base = OTHER; note = 2'-O-methyl modified nucleotide
  modified_base 120: mod_base = OTHER; note = Nucleotide with phosphorothioate linkage
  modified_base 121: mod_base = OTHER; note = 2'-O-methyl modified nucleotide with phosphorothioate linkage
  modified_base 122: mod_base = OTHER; note = 2'-O-methyl modified nucleotide with phosphorothioate linkage
  modified_base 123: mod_base = OTHER; note = 2'-O-methyl modified nucleotide
gctggtacacggcagggtcagttttagagctagaaatagcaagttaaaataaggctagtccgttatcaacttgaaaaagtggcaccgagtcggtgcgaaccctgatagttgaccctgccgtgt

SEQ ID NO: 16478 - RNA, 122 nt, synthetic construct
  source 1..122: mol_type = other RNA
  modified_base 1: mod_base = OTHER; note = 2'-O-methyl modified nucleotide with phosphorothioate linkage
  modified_base 2: mod_base = OTHER; note = 2'-O-methyl modified nucleotide with phosphorothioate linkage
  modified_base 3: mod_base = OTHER; note = 2'-O-methyl modified nucleotide with phosphorothioate linkage
  modified_base 29: mod_base = OTHER; note = 2'-O-methyl modified nucleotide
  modified_base 30: mod_base = OTHER; note = 2'-O-methyl modified nucleotide
  modified_base 31: mod_base = OTHER; note = 2'-O-methyl modified nucleotide
  modified_base 32: mod_base = OTHER; note = 2'-O-methyl modified nucleotide
  modified_base 33: mod_base = OTHER; note = 2'-O-methyl modified nucleotide
  modified_base 34: mod_base = OTHER; note = 2'-O-methyl modified nucleotide
  modified_base 35: mod_base = OTHER; note = 2'-O-methyl modified nucleotide
  modified_base 36: mod_base = OTHER; note = 2'-O-methyl modified nucleotide
  modified_base 37: mod_base = OTHER; note = 2'-O-methyl modified nucleotide
  modified_base 38: mod_base = OTHER; note = 2'-O-methyl modified nucleotide
  modified_base 39: mod_base = OTHER; note = 2'-O-methyl modified nucleotide
  modified_base 40: mod_base = OTHER; note = 2'-O-methyl modified nucleotide
  modified_base 69: mod_base = OTHER; note = 2'-O-methyl modified nucleotide
  modified_base 70: mod_base = OTHER; note = 2'-O-methyl modified nucleotide
  modified_base 71: mod_base = OTHER; note = 2'-O-methyl modified nucleotide
  modified_base 72: mod_base = OTHER; note = 2'-O-methyl modified nucleotide
  modified_base 73: mod_base = OTHER; note = 2'-O-methyl modified nucleotide
  modified_base 74: mod_base = OTHER; note = 2'-O-methyl modified nucleotide
  modified_base 75: mod_base = OTHER; note = 2'-O-methyl modified nucleotide
  modified_base 76: mod_base = OTHER; note = 2'-O-methyl modified nucleotide
  modified_base 77: mod_base = OTHER; note = 2'-O-methyl modified nucleotide
  modified_base 78: mod_base = OTHER; note = 2'-O-methyl modified nucleotide
  modified_base 79: mod_base = OTHER; note = 2'-O-methyl modified nucleotide
  modified_base 80: mod_base = OTHER; note = 2'-O-methyl modified nucleotide
  modified_base 81: mod_base = OTHER; note = 2'-O-methyl modified nucleotide
  modified_base 82: mod_base = OTHER; note = 2'-O-methyl modified nucleotide
  modified_base 83: mod_base = OTHER; note = 2'-O-methyl modified nucleotide
  modified_base 84: mod_base = OTHER; note = 2'-O-methyl modified nucleotide
  modified_base 85: mod_base = OTHER; note = 2'-O-methyl modified nucleotide
  modified_base 86: mod_base = OTHER; note = 2'-O-methyl modified nucleotide
  modified_base 87: mod_base = OTHER; note = 2'-O-methyl modified nucleotide
  modified_base 88: mod_base = OTHER; note = 2'-O-methyl modified nucleotide
  modified_base 89: mod_base = OTHER; note = 2'-O-methyl modified nucleotide
  modified_base 90: mod_base = OTHER; note = 2'-O-methyl modified nucleotide
  modified_base 91: mod_base = OTHER; note = 2'-O-methyl modified nucleotide
  modified_base 92: mod_base = OTHER; note = 2'-O-methyl modified nucleotide
  modified_base 93: mod_base = OTHER; note = 2'-O-methyl modified nucleotide
  modified_base 94: mod_base = OTHER; note = 2'-O-methyl modified nucleotide
  modified_base 95: mod_base = OTHER; note = 2'-O-methyl modified nucleotide
  modified_base 96: mod_base = OTHER; note = 2'-O-methyl modified nucleotide
  modified_base 119: mod_base = OTHER; note = Nucleotide with phosphorothioate linkage
  modified_base 120: mod_base = OTHER; note = 2'-O-methyl modified nucleotide with phosphorothioate linkage
  modified_base 121: mod_base = OTHER; note = 2'-O-methyl modified nucleotide with phosphorothioate linkage
  modified_base 122: mod_base = OTHER; note = 2'-O-methyl modified nucleotide
gctggtacacggcagggtcagttttagagctagaaatagcaagttaaaataaggctagtccgttatcaacttgaaaaagtggcaccgagtcggtgcgaaccctgatagttgaccctgccgtg

SEQ ID NO: 16479 - RNA, 121 nt, synthetic construct
  source 1..121: mol_type = other RNA
  modified_base 1: mod_base = OTHER; note = 2'-O-methyl modified nucleotide with phosphorothioate linkage
  modified_base 2: mod_base = OTHER; note = 2'-O-methyl modified nucleotide with phosphorothioate linkage
  modified_base 3: mod_base = OTHER; note = 2'-O-methyl modified nucleotide with phosphorothioate linkage
  modified_base 29: mod_base = OTHER; note = 2'-O-methyl modified nucleotide
  modified_base 30: mod_base = OTHER; note = 2'-O-methyl modified nucleotide
  modified_base 31: mod_base = OTHER; note = 2'-O-methyl modified nucleotide
  modified_base 32: mod_base = OTHER; note = 2'-O-methyl modified nucleotide
  modified_base 33: mod_base = OTHER; note = 2'-O-methyl modified nucleotide
  modified_base 34: mod_base = OTHER; note = 2'-O-methyl modified nucleotide
  modified_base 35: mod_base = OTHER; note = 2'-O-methyl modified nucleotide
  modified_base 36: mod_base = OTHER; note = 2'-O-methyl modified nucleotide
  modified_base 37: mod_base = OTHER; note = 2'-O-methyl modified nucleotide
  modified_base 38: mod_base = OTHER; note = 2'-O-methyl modified nucleotide
  modified_base 39: mod_base = OTHER; note = 2'-O-methyl modified nucleotide
  modified_base 40: mod_base = OTHER; note = 2'-O-methyl modified nucleotide
  modified_base 69: mod_base = OTHER; note = 2'-O-methyl modified nucleotide
  modified_base 70: mod_base = OTHER; note = 2'-O-methyl modified nucleotide
  modified_base 71: mod_base = OTHER; note = 2'-O-methyl modified nucleotide
  modified_base 72: mod_base = OTHER; note = 2'-O-methyl modified nucleotide
  modified_base 73: mod_base = OTHER; note = 2'-O-methyl modified nucleotide
  modified_base 74: mod_base = OTHER; note = 2'-O-methyl modified nucleotide
  modified_base 75: mod_base = OTHER; note = 2'-O-methyl modified nucleotide
  modified_base 76: mod_base = OTHER; note = 2'-O-methyl modified nucleotide
  modified_base 77: mod_base = OTHER; note = 2'-O-methyl modified nucleotide
  modified_base 78: mod_base = OTHER; note = 2'-O-methyl modified nucleotide
  modified_base 79: mod_base = OTHER; note = 2'-O-methyl modified nucleotide
  modified_base 80: mod_base = OTHER; note = 2'-O-methyl modified nucleotide
  modified_base 81: mod_base = OTHER; note = 2'-O-methyl modified nucleotide
  modified_base 82: mod_base = OTHER; note = 2'-O-methyl modified nucleotide
  modified_base 83: mod_base = OTHER; note = 2'-O-methyl modified nucleotide
  modified_base 84: mod_base = OTHER; note = 2'-O-methyl modified nucleotide
  modified_base 85: mod_base = OTHER; note = 2'-O-methyl modified nucleotide
  modified_base 86: mod_base = OTHER; note = 2'-O-methyl modified nucleotide
  modified_base 87: mod_base = OTHER; note = 2'-O-methyl modified nucleotide
  modified_base 88: mod_base = OTHER; note = 2'-O-methyl modified nucleotide
  modified_base 89: mod_base = OTHER; note = 2'-O-methyl modified nucleotide
  modified_base 90: mod_base = OTHER; note = 2'-O-methyl modified nucleotide
  modified_base 91: mod_base = OTHER; note = 2'-O-methyl modified nucleotide
  modified_base 92: mod_base = OTHER; note = 2'-O-methyl modified nucleotide
  modified_base 93: mod_base = OTHER; note = 2'-O-methyl modified nucleotide
  modified_base 94: mod_base = OTHER; note = 2'-O-methyl modified nucleotide
  modified_base 95: mod_base = OTHER; note = 2'-O-methyl modified nucleotide
  modified_base 96: mod_base = OTHER; note = 2'-O-methyl modified nucleotide
  modified_base 118: mod_base = OTHER; note = Nucleotide with phosphorothioate linkage
  modified_base 119: mod_base = OTHER; note = 2'-O-methyl modified nucleotide with phosphorothioate linkage
  modified_base 120: mod_base = OTHER; note = 2'-O-methyl modified nucleotide with phosphorothioate linkage
  modified_base 121: mod_base = OTHER; note = 2'-O-methyl modified nucleotide
gctggtacacggcagggtcagttttagagctagaaatagcaagttaaaataaggctagtccgttatcaacttgaaaaagtggcaccgagtcggtgcgaaccctgatagttgaccctgccgt

SEQ ID NO: 16480 - RNA, 120 nt, synthetic construct
  source 1..120: mol_type = other RNA
  modified_base 1: mod_base = OTHER; note = 2'-O-methyl modified nucleotide with phosphorothioate linkage
  modified_base 2: mod_base = OTHER; note = 2'-O-methyl modified nucleotide with phosphorothioate linkage
  modified_base 3: mod_base = OTHER; note = 2'-O-methyl modified nucleotide with phosphorothioate linkage
  modified_base 29: mod_base = OTHER; note = 2'-O-methyl modified nucleotide
  modified_base 30: mod_base = OTHER; note = 2'-O-methyl modified nucleotide
  modified_base 31: mod_base = OTHER; note = 2'-O-methyl modified nucleotide
  modified_base 32: mod_base = OTHER; note = 2'-O-methyl modified nucleotide
  modified_base 33: mod_base = OTHER; note = 2'-O-methyl modified nucleotide
  modified_base 34: mod_base = OTHER; note = 2'-O-methyl modified nucleotide
  modified_base 35: mod_base = OTHER; note = 2'-O-methyl modified nucleotide
  modified_base 36: mod_base = OTHER; note = 2'-O-methyl modified nucleotide
  modified_base 37: mod_base = OTHER; note = 2'-O-methyl modified nucleotide
  modified_base 38: mod_base = OTHER; note = 2'-O-methyl modified nucleotide
  modified_base 39: mod_base = OTHER; note = 2'-O-methyl modified nucleotide
  modified_base 40: mod_base = OTHER; note = 2'-O-methyl modified nucleotide
  modified_base 69: mod_base = OTHER; note = 2'-O-methyl modified nucleotide
  modified_base 70: mod_base = OTHER; note = 2'-O-methyl modified nucleotide
  modified_base 71: mod_base = OTHER; note = 2'-O-methyl modified nucleotide
  modified_base 72: mod_base = OTHER; note = 2'-O-methyl modified nucleotide
  modified_base 73: mod_base = OTHER; note = 2'-O-methyl modified nucleotide
  modified_base 74: mod_base = OTHER; note = 2'-O-methyl modified nucleotide
  modified_base 75: mod_base = OTHER; note = 2'-O-methyl modified nucleotide
  modified_base 76: mod_base = OTHER; note = 2'-O-methyl modified nucleotide
  modified_base 77: mod_base = OTHER; note = 2'-O-methyl modified nucleotide
  modified_base 78: mod_base = OTHER; note = 2'-O-methyl modified nucleotide
  modified_base 79: mod_base = OTHER; note = 2'-O-methyl modified nucleotide
  modified_base 80: mod_base = OTHER; note = 2'-O-methyl modified nucleotide
  modified_base 81: mod_base = OTHER; note = 2'-O-methyl modified nucleotide
  modified_base 82: mod_base = OTHER; note = 2'-O-methyl modified nucleotide
  modified_base 83: mod_base = OTHER; note = 2'-O-methyl modified nucleotide
  modified_base 84: mod_base = OTHER; note = 2'-O-methyl modified nucleotide
  modified_base 85: mod_base = OTHER; note = 2'-O-methyl modified nucleotide
  modified_base 86: mod_base = OTHER; note = 2'-O-methyl modified nucleotide
  modified_base 87: mod_base = OTHER; note = 2'-O-methyl modified nucleotide
  modified_base 88: mod_base = OTHER; note = 2'-O-methyl modified nucleotide
  modified_base 89: mod_base = OTHER; note = 2'-O-methyl modified nucleotide
  modified_base 90: mod_base = OTHER; note = 2'-O-methyl modified nucleotide
  modified_base 91: mod_base = OTHER; note = 2'-O-methyl modified nucleotide
  modified_base 92: mod_base = OTHER; note = 2'-O-methyl modified nucleotide
  modified_base 93: mod_base = OTHER; note = 2'-O-methyl modified nucleotide
  modified_base 94: mod_base = OTHER; note = 2'-O-methyl modified nucleotide
  modified_base 95: mod_base = OTHER; note = 2'-O-methyl modified nucleotide
  modified_base 96: mod_base = OTHER; note = 2'-O-methyl modified nucleotide
  modified_base 117: mod_base = OTHER; note = Nucleotide with phosphorothioate linkage
  modified_base 118: mod_base = OTHER; note = 2'-O-methyl modified nucleotide with phosphorothioate linkage
  modified_base 119: mod_base = OTHER; note = 2'-O-methyl modified nucleotide with phosphorothioate linkage
  modified_base 120: mod_base = OTHER; note = 2'-O-methyl modified nucleotide
gctggtacacggcagggtcagttttagagctagaaatagcaagttaaaataaggctagtccgttatcaacttgaaaaagtggcaccgagtcggtgcgaaccctgatagttgaccctgccg

SEQ ID NO: 16481 - RNA, 127 nt, synthetic construct
  source 1..127: mol_type = other RNA
  modified_base 1: mod_base = OTHER; note = 2'-O-methyl modified nucleotide with phosphorothioate linkage
  modified_base 2: mod_base = OTHER; note = 2'-O-methyl modified nucleotide with phosphorothioate linkage
  modified_base 3: mod_base = OTHER; note = 2'-O-methyl modified nucleotide with phosphorothioate linkage
  modified_base 29: mod_base = OTHER; note = 2'-O-methyl modified nucleotide
  modified_base 30: mod_base = OTHER; note = 2'-O-methyl modified nucleotide
  modified_base 31: mod_base = OTHER; note = 2'-O-methyl modified nucleotide
  modified_base 32: mod_base = OTHER; note = 2'-O-methyl modified nucleotide
  modified_base 33: mod_base = OTHER; note = 2'-O-methyl modified nucleotide
  modified_base 34: mod_base = OTHER; note = 2'-O-methyl modified nucleotide
  modified_base 35: mod_base = OTHER; note = 2'-O-methyl modified nucleotide
  modified_base 36: mod_base = OTHER; note = 2'-O-methyl modified nucleotide
  modified_base 37: mod_base = OTHER; note = 2'-O-methyl modified nucleotide
  modified_base 38: mod_base = OTHER; note = 2'-O-methyl modified nucleotide
  modified_base 39: mod_base = OTHER; note = 2'-O-methyl modified nucleotide
  modified_base 40: mod_base = OTHER; note = 2'-O-methyl modified nucleotide
  modified_base 69: mod_base = OTHER; note = 2'-O-methyl modified nucleotide
  modified_base 70: mod_base = OTHER; note = 2'-O-methyl modified nucleotide
  modified_base 71: mod_base = OTHER; note = 2'-O-methyl modified nucleotide
  modified_base 72: mod_base = OTHER; note = 2'-O-methyl modified nucleotide
  modified_base 73: mod_base = OTHER; note = 2'-O-methyl modified nucleotide
  modified_base 74: mod_base = OTHER; note = 2'-O-methyl modified nucleotide
  modified_base 75: mod_base = OTHER; note = 2'-O-methyl modified nucleotide
  modified_base 76: mod_base = OTHER; note = 2'-O-methyl modified nucleotide
  modified_base 77: mod_base = OTHER; note = 2'-O-methyl modified nucleotide
  modified_base 78: mod_base = OTHER; note = 2'-O-methyl modified nucleotide
  modified_base 79: mod_base = OTHER; note = 2'-O-methyl modified nucleotide
  modified_base 80: mod_base = OTHER; note = 2'-O-methyl modified nucleotide
  modified_base 81: mod_base = OTHER; note = 2'-O-methyl modified nucleotide
  modified_base 82: mod_base = OTHER; note = 2'-O-methyl modified nucleotide
  modified_base 83: mod_base = OTHER; note = 2'-O-methyl modified nucleotide
  modified_base 84: mod_base = OTHER; note = 2'-O-methyl modified nucleotide
  modified_base 85: mod_base = OTHER; note = 2'-O-methyl modified nucleotide
  modified_base 86: mod_base = OTHER; note = 2'-O-methyl modified nucleotide
  modified_base 87: mod_base = OTHER; note = 2'-O-methyl modified nucleotide
  modified_base 88: mod_base = OTHER; note = 2'-O-methyl modified nucleotide
  modified_base 89: mod_base = OTHER; note = 2'-O-methyl modified nucleotide
  modified_base 90: mod_base = OTHER; note = 2'-O-methyl modified nucleotide
  modified_base 91: mod_base = OTHER; note = 2'-O-methyl modified nucleotide
  modified_base 92: mod_base = OTHER; note = 2'-O-methyl modified nucleotide
  modified_base 93: mod_base = OTHER; note = 2'-O-methyl modified nucleotide
  modified_base 94: mod_base = OTHER; note = 2'-O-methyl modified nucleotide
  modified_base 95: mod_base = OTHER; note = 2'-O-methyl modified nucleotide
  modified_base 96: mod_base = OTHER; note = 2'-O-methyl modified nucleotide
  modified_base 124: mod_base = OTHER; note = Nucleotide with phosphorothioate linkage
  modified_base 125: mod_base = OTHER; note = 2'-O-methyl modified nucleotide with phosphorothioate linkage
  modified_base 126: mod_base = OTHER; note = 2'-O-methyl modified nucleotide with phosphorothioate linkage
  modified_base 127: mod_base = OTHER; note = 2'-O-methyl modified nucleotide
gctggtacacggcagggtcagttttagagctagaaatagcaagttaaaataaggctagtccgttatcaacttgaaaaagtggcaccgagtcggtgccagaaccctgatagttgaccctgccgtgtac

SEQ ID NO: 16482 - RNA, 126 nt, synthetic construct
  source 1..126: mol_type = other RNA
  modified_base 1: mod_base = OTHER; note = 2'-O-methyl modified nucleotide with phosphorothioate linkage
  modified_base 2: mod_base = OTHER; note = 2'-O-methyl modified nucleotide with phosphorothioate linkage
  modified_base 3: mod_base = OTHER; note = 2'-O-methyl modified nucleotide with phosphorothioate linkage
  modified_base 29: mod_base = OTHER; note = 2'-O-methyl modified nucleotide
  modified_base 30: mod_base = OTHER; note = 2'-O-methyl modified nucleotide
  modified_base 31: mod_base = OTHER; note = 2'-O-methyl modified nucleotide
  modified_base 32: mod_base = OTHER; note = 2'-O-methyl modified nucleotide
  modified_base 33: mod_base = OTHER; note = 2'-O-methyl modified nucleotide
  modified_base 34: mod_base = OTHER; note = 2'-O-methyl modified nucleotide
  modified_base 35: mod_base = OTHER; note = 2'-O-methyl modified nucleotide
  modified_base 36: mod_base = OTHER; note = 2'-O-methyl modified nucleotide
  modified_base 37: mod_base = OTHER; note = 2'-O-methyl modified nucleotide
  modified_base 38: mod_base = OTHER; note = 2'-O-methyl modified nucleotide
  modified_base 39: mod_base = OTHER; note = 2'-O-methyl modified nucleotide
  modified_base 40: mod_base = OTHER; note = 2'-O-methyl modified nucleotide
  modified_base 69: mod_base = OTHER; note = 2'-O-methyl modified nucleotide
  modified_base 70: mod_base = OTHER; note = 2'-O-methyl modified nucleotide
  modified_base 71: mod_base = OTHER; note = 2'-O-methyl modified nucleotide
  modified_base 72: mod_base = OTHER; note = 2'-O-methyl modified nucleotide
  modified_base 73: mod_base = OTHER; note = 2'-O-methyl modified nucleotide
  modified_base 74: mod_base = OTHER; note = 2'-O-methyl modified nucleotide
  modified_base 75: mod_base = OTHER; note = 2'-O-methyl modified nucleotide
  modified_base 76: mod_base = OTHER; note = 2'-O-methyl modified nucleotide
  modified_base 77: mod_base = OTHER; note = 2'-O-methyl modified nucleotide
  modified_base 78: mod_base = OTHER; note = 2'-O-methyl modified nucleotide
  modified_base 79: mod_base = OTHER; note = 2'-O-methyl modified nucleotide
  modified_base 80: mod_base = OTHER; note = 2'-O-methyl modified nucleotide
  modified_base 81: mod_base = OTHER; note = 2'-O-methyl modified nucleotide
  modified_base 82: mod_base = OTHER; note = 2'-O-methyl modified nucleotide
  modified_base 83: mod_base = OTHER; note = 2'-O-methyl modified nucleotide
  modified_base 84: mod_base = OTHER; note = 2'-O-methyl modified nucleotide
  modified_base 85: mod_base = OTHER; note = 2'-O-methyl modified nucleotide
  modified_base 86: mod_base = OTHER; note = 2'-O-methyl modified nucleotide
  modified_base 87: mod_base = OTHER; note = 2'-O-methyl modified nucleotide
  modified_base 88: mod_base = OTHER; note = 2'-O-methyl modified nucleotide
  modified_base 89: mod_base = OTHER; note = 2'-O-methyl modified nucleotide
  modified_base 90: mod_base = OTHER; note = 2'-O-methyl modified nucleotide
  modified_base 91: mod_base = OTHER; note = 2'-O-methyl modified nucleotide
  modified_base 92: mod_base = OTHER; note = 2'-O-methyl modified nucleotide
  modified_base 93: mod_base = OTHER; note = 2'-O-methyl modified nucleotide
  modified_base 94: mod_base = OTHER; note = 2'-O-methyl modified nucleotide
  modified_base 95: mod_base = OTHER; note = 2'-O-methyl modified nucleotide
  modified_base 96: mod_base = OTHER; note = 2'-O-methyl modified nucleotide
  modified_base 123: mod_base = OTHER; note = Nucleotide with phosphorothioate linkage
  modified_base 124: mod_base = OTHER; note = 2'-O-methyl modified nucleotide with phosphorothioate linkage
  modified_base 125: mod_base = OTHER; note = 2'-O-methyl modified nucleotide with phosphorothioate linkage
  modified_base 126: mod_base = OTHER; note = 2'-O-methyl modified nucleotide
gctggtacacggcagggtcagttttagagctagaaatagcaagttaaaataaggctagtccgttatcaacttgaaaaagtggcaccgagtcggtgccagaaccctgatagttgaccctgccgtgta

SEQ ID NO: 16483 - RNA, 125 nt, synthetic construct
  source 1..125: mol_type = other RNA
  modified_base 1: mod_base = OTHER; note = 2'-O-methyl modified nucleotide with phosphorothioate linkage
  modified_base 2: mod_base = OTHER; note = 2'-O-methyl modified nucleotide with phosphorothioate linkage
  modified_base 3: mod_base = OTHER; note = 2'-O-methyl modified nucleotide with phosphorothioate linkage
  modified_base 29: mod_base = OTHER; note = 2'-O-methyl modified nucleotide
  modified_base 30: mod_base = OTHER; note = 2'-O-methyl modified nucleotide
  modified_base 31: mod_base = OTHER; note = 2'-O-methyl modified nucleotide
  modified_base 32: mod_base = OTHER; note = 2'-O-methyl modified nucleotide
  modified_base 33: mod_base = OTHER; note = 2'-O-methyl modified nucleotide
  modified_base 34: mod_base = OTHER; note = 2'-O-methyl modified nucleotide
  modified_base 35: mod_base = OTHER; note = 2'-O-methyl modified nucleotide
  modified_base 36: mod_base = OTHER; note = 2'-O-methyl modified nucleotide
  modified_base 37: mod_base = OTHER; note = 2'-O-methyl modified nucleotide
  modified_base 38: mod_base = OTHER; note = 2'-O-methyl modified nucleotide
  modified_base 39: mod_base = OTHER; note = 2'-O-methyl modified nucleotide
  modified_base 40: mod_base = OTHER; note = 2'-O-methyl modified nucleotide
  modified_base 69: mod_base = OTHER; note = 2'-O-methyl modified nucleotide
  modified_base 70: mod_base = OTHER; note = 2'-O-methyl modified nucleotide
  modified_base 71: mod_base = OTHER; note = 2'-O-methyl modified nucleotide
  modified_base 72: mod_base = OTHER; note = 2'-O-methyl modified nucleotide
  modified_base 73: mod_base = OTHER; note = 2'-O-methyl modified nucleotide
  modified_base 74: mod_base = OTHER; note = 2'-O-methyl modified nucleotide
  modified_base 75: mod_base = OTHER; note = 2'-O-methyl modified nucleotide
  modified_base 76: mod_base = OTHER; note = 2'-O-methyl modified nucleotide
  modified_base 77: mod_base = OTHER; note = 2'-O-methyl modified nucleotide
  modified_base 78: mod_base = OTHER; note = 2'-O-methyl modified nucleotide
  modified_base 79: mod_base = OTHER; note = 2'-O-methyl modified nucleotide
  modified_base 80: mod_base = OTHER; note = 2'-O-methyl modified nucleotide
  modified_base 81: mod_base = OTHER; note = 2'-O-methyl modified nucleotide
  modified_base 82: mod_base = OTHER; note = 2'-O-methyl modified nucleotide
  modified_base 83: mod_base = OTHER; note = 2'-O-methyl modified nucleotide
  modified_base 84: mod_base = OTHER; note = 2'-O-methyl modified nucleotide
  modified_base 85: mod_base = OTHER; note = 2'-O-methyl modified nucleotide
  modified_base 86: mod_base = OTHER; note = 2'-O-methyl modified nucleotide
  modified_base 87: mod_base = OTHER; note = 2'-O-methyl modified nucleotide
  modified_base 88: mod_base = OTHER; note = 2'-O-methyl modified nucleotide
  modified_base 89: mod_base = OTHER; note = 2'-O-methyl modified nucleotide
  modified_base 90: mod_base = OTHER; note = 2'-O-methyl modified nucleotide
  modified_base 91: mod_base = OTHER; note = 2'-O-methyl modified nucleotide
  modified_base 92: mod_base = OTHER; note = 2'-O-methyl modified nucleotide
  modified_base 93: mod_base = OTHER; note = 2'-O-methyl modified nucleotide
  modified_base 94: mod_base = OTHER; note = 2'-O-methyl modified nucleotide
  modified_base 95: mod_base = OTHER; note = 2'-O-methyl modified nucleotide
  modified_base 96: mod_base = OTHER; note = 2'-O-methyl modified nucleotide
  modified_base 122: mod_base = OTHER; note = Nucleotide with phosphorothioate linkage
  modified_base 123: mod_base = OTHER; note = 2'-O-methyl modified nucleotide with phosphorothioate linkage
  modified_base 124: mod_base = OTHER; note = 2'-O-methyl modified nucleotide with phosphorothioate linkage
  modified_base 125: mod_base = OTHER; note = 2'-O-methyl modified nucleotide
gctggtacacggcagggtcagttttagagctagaaatagcaagttaaaataaggctagtccgttatcaacttgaaaaagtggcaccgagtcggtgccagaaccctgatagttgaccctgccgtgt

SEQ ID NO: 16484 - RNA, 124 nt, synthetic construct
  source 1..124: mol_type = other RNA
  modified_base 1: mod_base = OTHER; note = 2'-O-methyl modified nucleotide with phosphorothioate linkage
  modified_base 2: mod_base = OTHER; note = 2'-O-methyl modified nucleotide with phosphorothioate linkage
  modified_base 3: mod_base = OTHER; note = 2'-O-methyl modified nucleotide with phosphorothioate linkage
  modified_base 29: mod_base = OTHER; note = 2'-O-methyl modified nucleotide
  modified_base 30: mod_base = OTHER; note = 2'-O-methyl modified nucleotide
  modified_base 31: mod_base = OTHER; note = 2'-O-methyl modified nucleotide
  modified_base 32: mod_base = OTHER; note = 2'-O-methyl modified nucleotide
  modified_base 33: mod_base = OTHER; note = 2'-O-methyl modified nucleotide
  modified_base 34: mod_base = OTHER; note = 2'-O-methyl modified nucleotide
  modified_base 35: mod_base = OTHER; note = 2'-O-methyl modified nucleotide
  modified_base 36: mod_base = OTHER; note = 2'-O-methyl modified nucleotide
  modified_base 37: mod_base = OTHER; note = 2'-O-methyl modified nucleotide
  modified_base 38: mod_base = OTHER; note = 2'-O-methyl modified nucleotide
  modified_base 39: mod_base = OTHER; note = 2'-O-methyl modified nucleotide
  modified_base 40: mod_base = OTHER; note = 2'-O-methyl modified nucleotide
  modified_base 69: mod_base = OTHER; note = 2'-O-methyl modified nucleotide
  modified_base 70: mod_base = OTHER; note = 2'-O-methyl modified nucleotide
  modified_base 71: mod_base = OTHER; note = 2'-O-methyl modified nucleotide
  modified_base 72: mod_base = OTHER; note = 2'-O-methyl modified nucleotide
  modified_base 73: mod_base = OTHER; note = 2'-O-methyl modified nucleotide
  modified_base 74: mod_base = OTHER; note = 2'-O-methyl modified nucleotide
  modified_base 75: mod_base = OTHER; note = 2'-O-methyl modified nucleotide
  modified_base 76: mod_base = OTHER; note = 2'-O-methyl modified nucleotide
  modified_base 77: mod_base = OTHER; note = 2'-O-methyl modified nucleotide
  modified_base 78: mod_base = OTHER; note = 2'-O-methyl modified nucleotide
  modified_base 79: mod_base = OTHER; note = 2'-O-methyl modified nucleotide
  modified_base 80: mod_base = OTHER; note = 2'-O-methyl modified nucleotide
  modified_base 81: mod_base = OTHER; note = 2'-O-methyl modified nucleotide
  modified_base 82: mod_base = OTHER; note = 2'-O-methyl modified nucleotide
  modified_base 83: mod_base = OTHER; note = 2'-O-methyl modified nucleotide
  modified_base 84: mod_base = OTHER; note = 2'-O-methyl modified nucleotide
  modified_base 85: mod_base = OTHER; note = 2'-O-methyl modified nucleotide
  modified_base 86: mod_base = OTHER; note = 2'-O-methyl modified nucleotide
  modified_base 87: mod_base = OTHER; note = 2'-O-methyl modified nucleotide
  modified_base 88: mod_base = OTHER; note = 2'-O-methyl modified nucleotide
  modified_base 89: mod_base = OTHER; note = 2'-O-methyl modified nucleotide
  modified_base 90: mod_base = OTHER; note = 2'-O-methyl modified nucleotide
  modified_base 91: mod_base = OTHER; note = 2'-O-methyl modified nucleotide
  modified_base 92: mod_base = OTHER; note = 2'-O-methyl modified nucleotide
  modified_base 93: mod_base = OTHER; note = 2'-O-methyl modified nucleotide
  modified_base 94: mod_base = OTHER; note = 2'-O-methyl modified nucleotide
  modified_base 95: mod_base = OTHER; note = 2'-O-methyl modified nucleotide
  modified_base 96: mod_base = OTHER; note = 2'-O-methyl modified nucleotide
  modified_base 121: mod_base = OTHER; note = Nucleotide with phosphorothioate linkage
  modified_base 122: mod_base = OTHER; note = 2'-O-methyl modified nucleotide with phosphorothioate linkage
  modified_base 123: mod_base = OTHER; note = 2'-O-methyl modified nucleotide with phosphorothioate linkage
  modified_base 124: mod_base = OTHER; note = 2'-O-methyl modified nucleotide
gctggtacacggcagggtcagttttagagctagaaatagcaagttaaaataaggctagtccgttatcaacttgaaaaagtggcaccgagtcggtgccagaaccctgatagttgaccctgccgtg

SEQ ID NO: 16485 - RNA, 123 nt, synthetic construct
  source 1..123: mol_type = other RNA
  modified_base 1: mod_base = OTHER; note = 2'-O-methyl modified nucleotide with phosphorothioate linkage
  modified_base 2: mod_base = OTHER; note = 2'-O-methyl modified nucleotide with phosphorothioate linkage
  modified_base 3: mod_base = OTHER; note = 2'-O-methyl modified nucleotide with phosphorothioate linkage
  modified_base 29: mod_base = OTHER; note = 2'-O-methyl modified nucleotide
  modified_base 30: mod_base = OTHER; note = 2'-O-methyl modified nucleotide
  modified_base 31: mod_base = OTHER; note = 2'-O-methyl modified nucleotide
  modified_base 32: mod_base = OTHER; note = 2'-O-methyl modified nucleotide
  modified_base 33: mod_base = OTHER; note = 2'-O-methyl modified nucleotide
  modified_base 34: mod_base = OTHER; note = 2'-O-methyl modified nucleotide
  modified_base 35: mod_base = OTHER; note = 2'-O-methyl modified nucleotide
  modified_base 36: mod_base = OTHER; note = 2'-O-methyl modified nucleotide
  modified_base 37: mod_base = OTHER; note = 2'-O-methyl modified nucleotide
  modified_base 38: mod_base = OTHER; note = 2'-O-methyl modified nucleotide
  modified_base 39: mod_base = OTHER; note = 2'-O-methyl modified nucleotide
  modified_base 40: mod_base = OTHER; note = 2'-O-methyl modified nucleotide
  modified_base 69: mod_base = OTHER; note = 2'-O-methyl modified nucleotide
  modified_base 70: mod_base = OTHER; note = 2'-O-methyl modified nucleotide
  modified_base 71: mod_base = OTHER; note = 2'-O-methyl modified nucleotide
  modified_base 72: mod_base = OTHER; note = 2'-O-methyl modified nucleotide
  modified_base 73: mod_base = OTHER; note = 2'-O-methyl modified nucleotide
  modified_base 74: mod_base = OTHER; note = 2'-O-methyl modified nucleotide
  modified_base 75: mod_base = OTHER; note = 2'-O-methyl modified nucleotide
  modified_base 76: mod_base = OTHER; note = 2'-O-methyl modified nucleotide
  modified_base 77: mod_base = OTHER; note = 2'-O-methyl modified nucleotide
  modified_base 78: mod_base = OTHER; note = 2'-O-methyl modified nucleotide
  modified_base 79: mod_base = OTHER; note = 2'-O-methyl modified nucleotide
  modified_base 80: mod_base = OTHER; note = 2'-O-methyl modified nucleotide
  modified_base 81: mod_base = OTHER; note = 2'-O-methyl modified nucleotide
  modified_base 82: mod_base = OTHER; note = 2'-O-methyl modified nucleotide
  modified_base 83: mod_base = OTHER; note = 2'-O-methyl modified nucleotide
  modified_base 84: mod_base = OTHER; note = 2'-O-methyl modified nucleotide
  modified_base 85: mod_base = OTHER; note = 2'-O-methyl modified nucleotide
  modified_base 86: mod_base = OTHER; note = 2'-O-methyl modified nucleotide
  modified_base 87: mod_base = OTHER; note = 2'-O-methyl modified nucleotide
  modified_base 88: mod_base = OTHER; note = 2'-O-methyl modified nucleotide
  modified_base 89: mod_base = OTHER; note = 2'-O-methyl modified nucleotide
  modified_base 90: mod_base = OTHER; note = 2'-O-methyl modified nucleotide
  modified_base 91: mod_base = OTHER; note = 2'-O-methyl modified nucleotide
  modified_base 92: mod_base = OTHER; note = 2'-O-methyl modified nucleotide
  modified_base 93: mod_base = OTHER; note = 2'-O-methyl modified nucleotide
  modified_base 94: mod_base = OTHER; note = 2'-O-methyl modified nucleotide
  modified_base 95: mod_base = OTHER; note = 2'-O-methyl modified nucleotide
  modified_base 96: mod_base = OTHER; note = 2'-O-methyl modified nucleotide
  modified_base 120: mod_base = OTHER; note = Nucleotide with phosphorothioate linkage
  modified_base 121: mod_base = OTHER; note = 2'-O-methyl modified nucleotide with phosphorothioate linkage
  modified_base 122: mod_base = OTHER; note = 2'-O-methyl modified nucleotide with phosphorothioate linkage
  modified_base 123: mod_base = OTHER; note = 2'-O-methyl modified nucleotide
gctggtacacggcagggtcagttttagagctagaaatagcaagttaaaataaggctagtccgttatcaacttgaaaaagtggcaccgagtcggtgccagaaccctgatagttgaccctgccgt

SEQ ID NO: 16486 - RNA, 122 nt, synthetic construct
  source 1..122: mol_type = other RNA
  modified_base 1: mod_base = OTHER; note = 2'-O-methyl modified nucleotide with phosphorothioate linkage
  modified_base 2: mod_base = OTHER; note = 2'-O-methyl modified nucleotide with phosphorothioate linkage
  modified_base 3: mod_base = OTHER; note = 2'-O-methyl modified nucleotide with phosphorothioate linkage
  modified_base 29: mod_base = OTHER; note = 2'-O-methyl modified nucleotide
  modified_base 30: mod_base = OTHER; note = 2'-O-methyl modified nucleotide
  modified_base 31: mod_base = OTHER; note = 2'-O-methyl modified nucleotide
  modified_base 32: mod_base = OTHER; note = 2'-O-methyl modified nucleotide
  modified_base 33: mod_base = OTHER; note = 2'-O-methyl modified nucleotide
  modified_base 34: mod_base = OTHER; note = 2'-O-methyl modified nucleotide
  modified_base 35: mod_base = OTHER; note = 2'-O-methyl modified nucleotide
  modified_base 36: mod_base = OTHER; note = 2'-O-methyl modified nucleotide
  modified_base 37: mod_base = OTHER; note = 2'-O-methyl modified nucleotide
  modified_base 38: mod_base = OTHER; note = 2'-O-methyl modified nucleotide
  modified_base 39: mod_base = OTHER; note = 2'-O-methyl modified nucleotide
  modified_base 40: mod_base = OTHER; note = 2'-O-methyl modified nucleotide
  modified_base 69: mod_base = OTHER; note = 2'-O-methyl modified nucleotide
  modified_base 70: mod_base = OTHER; note = 2'-O-methyl modified nucleotide
  modified_base 71: mod_base = OTHER; note = 2'-O-methyl modified nucleotide
  modified_base 72: mod_base = OTHER; note = 2'-O-methyl modified nucleotide
  modified_base 73: mod_base = OTHER; note = 2'-O-methyl modified nucleotide
  modified_base 74: mod_base = OTHER; note = 2'-O-methyl modified nucleotide
  modified_base 75: mod_base = OTHER; note = 2'-O-methyl modified nucleotide
  modified_base 76: mod_base = OTHER; note = 2'-O-methyl modified nucleotide
  modified_base 77: mod_base = OTHER; note = 2'-O-methyl modified nucleotide
  modified_base 78: mod_base = OTHER; note = 2'-O-methyl modified nucleotide
  modified_base 79: mod_base = OTHER; note = 2'-O-methyl modified nucleotide
  modified_base 80: mod_base = OTHER; note = 2'-O-methyl modified nucleotide
  modified_base 81: mod_base = OTHER; note = 2'-O-methyl modified nucleotide
  modified_base 82: mod_base = OTHER; note = 2'-O-methyl modified nucleotide
  modified_base 83: mod_base = OTHER; note = 2'-O-methyl modified nucleotide
  modified_base 84: mod_base = OTHER; note = 2'-O-methyl modified nucleotide
  modified_base 85: mod_base = OTHER; note = 2'-O-methyl modified nucleotide
  modified_base 86: mod_base = OTHER; note = 2'-O-methyl modified nucleotide
  modified_base 87: mod_base = OTHER; note = 2'-O-methyl modified nucleotide
  modified_base 88: mod_base = OTHER; note = 2'-O-methyl modified nucleotide
  modified_base 89: mod_base = OTHER; note = 2'-O-methyl modified nucleotide
  modified_base 90: mod_base = OTHER; note = 2'-O-methyl modified nucleotide
  modified_base 91: mod_base = OTHER; note = 2'-O-methyl modified nucleotide
  modified_base 92: mod_base = OTHER; note = 2'-O-methyl modified nucleotide
  modified_base 93: mod_base = OTHER; note = 2'-O-methyl modified nucleotide
  modified_base 94: mod_base = OTHER; note = 2'-O-methyl modified nucleotide
  modified_base 95: mod_base = OTHER; note = 2'-O-methyl modified nucleotide
  modified_base 96: mod_base = OTHER; note = 2'-O-methyl modified nucleotide
  modified_base 119: mod_base = OTHER; note = Nucleotide with phosphorothioate linkage
  modified_base 120: mod_base = OTHER; note = 2'-O-methyl modified nucleotide with phosphorothioate linkage
  modified_base 121: mod_base = OTHER; note = 2'-O-methyl modified nucleotide with phosphorothioate linkage
  modified_base 122: mod_base = OTHER; note = 2'-O-methyl modified nucleotide
gctggtacacggcagggtcagttttagagctagaaatagcaagttaaaataaggctagtccgttatcaacttgaaaaagtggcaccgagtcggtgccagaaccctgatagttgaccctgccg

SEQ ID NO: 16487 - RNA, 129 nt, synthetic construct
  source 1..129: mol_type = other RNA
  modified_base 1: mod_base = OTHER; note = 2'-O-methyl modified nucleotide with phosphorothioate linkage
  modified_base 2: mod_base = OTHER; note = 2'-O-methyl modified nucleotide with phosphorothioate linkage
  modified_base 3: mod_base = OTHER; note = 2'-O-methyl modified nucleotide with phosphorothioate linkage
  modified_base 29: mod_base = OTHER; note = 2'-O-methyl modified nucleotide
  modified_base 30: mod_base = OTHER; note = 2'-O-methyl modified nucleotide
  modified_base 31: mod_base = OTHER; note = 2'-O-methyl modified nucleotide
  modified_base 32: mod_base = OTHER; note = 2'-O-methyl modified nucleotide
  modified_base 33: mod_base = OTHER; note = 2'-O-methyl modified nucleotide
  modified_base 34: mod_base = OTHER; note = 2'-O-methyl modified nucleotide
  modified_base 35: mod_base = OTHER; note = 2'-O-methyl modified nucleotide
  modified_base 36: mod_base = OTHER; note = 2'-O-methyl modified nucleotide
  modified_base 37: mod_base = OTHER; note = 2'-O-methyl modified nucleotide
  modified_base 38: mod_base = OTHER; note = 2'-O-methyl modified nucleotide
  modified_base 39: mod_base = OTHER; note = 2'-O-methyl modified nucleotide
  modified_base 40: mod_base = OTHER; note = 2'-O-methyl modified nucleotide
  modified_base 69: mod_base = OTHER; note = 2'-O-methyl modified nucleotide
  modified_base 70: mod_base = OTHER; note = 2'-O-methyl modified nucleotide
  modified_base 71: mod_base = OTHER; note = 2'-O-methyl modified nucleotide
  modified_base 72: mod_base = OTHER; note = 2'-O-methyl modified nucleotide
  modified_base 73: mod_base = OTHER; note = 2'-O-methyl modified nucleotide
  modified_base 74: mod_base = OTHER; note = 2'-O-methyl modified nucleotide
  modified_base 75: mod_base = OTHER; note = 2'-O-methyl modified nucleotide
  modified_base 76: mod_base = OTHER; note = 2'-O-methyl modified nucleotide
  modified_base 77: mod_base = OTHER; note = 2'-O-methyl modified nucleotide
  modified_base 78: mod_base = OTHER; note = 2'-O-methyl modified nucleotide
  modified_base 79: mod_base = OTHER; note = 2'-O-methyl modified nucleotide
  modified_base 80: mod_base = OTHER; note = 2'-O-methyl modified nucleotide
  modified_base 81: mod_base = OTHER; note = 2'-O-methyl modified nucleotide
  modified_base 82: mod_base = OTHER; note = 2'-O-methyl modified nucleotide
  modified_base 83: mod_base = OTHER; note = 2'-O-methyl modified nucleotide
  modified_base 84: mod_base = OTHER; note = 2'-O-methyl modified nucleotide
  modified_base 85: mod_base = OTHER; note = 2'-O-methyl modified nucleotide
  modified_base 86: mod_base = OTHER; note = 2'-O-methyl modified nucleotide
  modified_base 87: mod_base = OTHER; note = 2'-O-methyl modified nucleotide
  modified_base 88: mod_base = OTHER; note = 2'-O-methyl modified nucleotide
  modified_base 89: mod_base = OTHER; note = 2'-O-methyl modified nucleotide
  modified_base 90: mod_base = OTHER; note = 2'-O-methyl modified nucleotide
  modified_base 91: mod_base = OTHER; note = 2'-O-methyl modified nucleotide
  modified_base 92: mod_base = OTHER; note = 2'-O-methyl modified nucleotide
  modified_base 93: mod_base = OTHER; note = 2'-O-methyl modified nucleotide
  modified_base 94: mod_base = OTHER; note = 2'-O-methyl modified nucleotide
  modified_base 95: mod_base = OTHER; note = 2'-O-methyl modified nucleotide
  modified_base 96: mod_base = OTHER; note = 2'-O-methyl modified nucleotide
  modified_base 126: mod_base = OTHER; note = Nucleotide with phosphorothioate linkage
  modified_base 127: mod_base = OTHER; note = 2'-O-methyl modified nucleotide with phosphorothioate linkage
  modified_base 128: mod_base = OTHER; note = 2'-O-methyl modified nucleotide with phosphorothioate linkage
  modified_base 129: mod_base = OTHER; note = 2'-O-methyl modified nucleotide
gctggtacacggcagggtcagttttagagctagaaatagcaagttaaaataaggctagtccgttatcaacttgaaaaagtggcaccgagtcggtgctccagaaccctgatagttgaccctgccgtgtac

SEQ ID NO: 16488 - RNA, 128 nt, synthetic construct
  source 1..128: mol_type = other RNA
  modified_base 1: mod_base = OTHER; note = 2'-O-methyl modified nucleotide with phosphorothioate linkage
  modified_base 2: mod_base = OTHER; note = 2'-O-methyl modified nucleotide with phosphorothioate linkage
  modified_base 3: mod_base = OTHER; note = 2'-O-methyl modified nucleotide with phosphorothioate linkage
  modified_base 29: mod_base = OTHER; note = 2'-O-methyl modified nucleotide
  modified_base 30: mod_base = OTHER; note = 2'-O-methyl modified nucleotide
  modified_base 31: mod_base = OTHER; note = 2'-O-methyl modified nucleotide
  modified_base 32: mod_base = OTHER; note = 2'-O-methyl modified nucleotide
  modified_base 33: mod_base = OTHER; note = 2'-O-methyl modified nucleotide
  modified_base 34: mod_base = OTHER; note = 2'-O-methyl modified nucleotide
  modified_base 35: mod_base = OTHER; note = 2'-O-methyl modified nucleotide
  modified_base 36: mod_base = OTHER; note = 2'-O-methyl modified nucleotide
  modified_base 37: mod_base = OTHER; note = 2'-O-methyl modified nucleotide
  modified_base 38: mod_base = OTHER; note = 2'-O-methyl modified nucleotide
  modified_base 39: mod_base = OTHER; note = 2'-O-methyl modified nucleotide
  modified_base 40: mod_base = OTHER; note = 2'-O-methyl modified nucleotide
  modified_base 69: mod_base = OTHER; note = 2'-O-methyl modified nucleotide
  modified_base 70: mod_base = OTHER; note = 2'-O-methyl modified nucleotide
  modified_base 71: mod_base = OTHER; note = 2'-O-methyl modified nucleotide
  modified_base 72: mod_base = OTHER; note = 2'-O-methyl modified nucleotide
  modified_base 73: mod_base = OTHER; note = 2'-O-methyl modified nucleotide
  modified_base 74: mod_base = OTHER; note = 2'-O-methyl modified nucleotide
  modified_base 75: mod_base = OTHER; note = 2'-O-methyl modified nucleotide
  modified_base 76: mod_base = OTHER; note = 2'-O-methyl modified nucleotide
  modified_base 77: mod_base = OTHER; note = 2'-O-methyl modified nucleotide
  modified_base 78: mod_base = OTHER; note = 2'-O-methyl modified nucleotide
  modified_base 79: mod_base = OTHER; note = 2'-O-methyl modified nucleotide
  modified_base 80: mod_base = OTHER; note = 2'-O-methyl modified nucleotide
  modified_base 81: mod_base = OTHER; note = 2'-O-methyl modified nucleotide
  modified_base 82: mod_base = OTHER; note = 2'-O-methyl modified nucleotide
  modified_base 83: mod_base = OTHER; note = 2'-O-methyl modified nucleotide
  modified_base 84: mod_base = OTHER; note = 2'-O-methyl modified nucleotide
  modified_base 85: mod_base = OTHER; note = 2'-O-methyl modified nucleotide
  modified_base 86: mod_base = OTHER; note = 2'-O-methyl modified nucleotide
  modified_base 87: mod_base = OTHER; note = 2'-O-methyl modified nucleotide
  modified_base 88: mod_base = OTHER; note = 2'-O-methyl modified nucleotide
  modified_base 89: mod_base = OTHER; note = 2'-O-methyl modified nucleotide
  modified_base 90: mod_base = OTHER; note = 2'-O-methyl modified nucleotide
  modified_base 91: mod_base = OTHER; note = 2'-O-methyl modified nucleotide
  modified_base 92: mod_base = OTHER; note = 2'-O-methyl modified nucleotide
  modified_base 93: mod_base = OTHER; note = 2'-O-methyl modified nucleotide
  modified_base 94: mod_base = OTHER; note = 2'-O-methyl modified nucleotide
  modified_base 95: mod_base = OTHER; note = 2'-O-methyl modified nucleotide
  modified_base 96: mod_base = OTHER; note = 2'-O-methyl modified nucleotide
  modified_base 125: mod_base = OTHER; note = Nucleotide with phosphorothioate linkage
  modified_base 126: mod_base = OTHER; note = 2'-O-methyl modified nucleotide with phosphorothioate linkage
  modified_base 127: mod_base = OTHER; note = 2'-O-methyl modified nucleotide with phosphorothioate linkage
  modified_base 128: mod_base = OTHER; note = 2'-O-methyl modified nucleotide
gctggtacacggcagggtcagttttagagctagaaatagcaagttaaaataaggctagtccgttatcaacttgaaaaagtggcaccgagtcggtgctccagaaccctgatagttgaccctgccgtgta

SEQ ID NO: 16489 - RNA, 127 nt, synthetic construct
  source 1..127: mol_type = other RNA
  modified_base 1: mod_base = OTHER; note = 2'-O-methyl modified nucleotide with phosphorothioate linkage
  modified_base 2: mod_base = OTHER; note = 2'-O-methyl modified nucleotide with phosphorothioate linkage
  modified_base 3: mod_base = OTHER; note = 2'-O-methyl modified nucleotide with phosphorothioate linkage
  modified_base 29: mod_base = OTHER; note = 2'-O-methyl modified nucleotide
  modified_base 30: mod_base = OTHER; note = 2'-O-methyl modified nucleotide
  modified_base 31: mod_base = OTHER; note = 2'-O-methyl modified nucleotide
  modified_base 32: mod_base = OTHER; note = 2'-O-methyl modified nucleotide
  modified_base 33: mod_base = OTHER; note = 2'-O-methyl modified nucleotide
  modified_base 34: mod_base = OTHER; note = 2'-O-methyl modified nucleotide
  modified_base 35: mod_base = OTHER; note = 2'-O-methyl modified nucleotide
  modified_base 36: mod_base = OTHER; note = 2'-O-methyl modified nucleotide
  modified_base 37: mod_base = OTHER; note = 2'-O-methyl modified nucleotide
  modified_base 38: mod_base = OTHER; note = 2'-O-methyl modified nucleotide
  modified_base 39: mod_base = OTHER; note = 2'-O-methyl modified nucleotide
  modified_base 40: mod_base = OTHER; note = 2'-O-methyl modified nucleotide
  modified_base 69: mod_base = OTHER; note = 2'-O-methyl modified nucleotide
  modified_base 70: mod_base = OTHER; note = 2'-O-methyl modified nucleotide
  modified_base 71: mod_base = OTHER; note = 2'-O-methyl modified nucleotide
  modified_base 72: mod_base = OTHER; note = 2'-O-methyl modified nucleotide
  modified_base 73: mod_base = OTHER; note = 2'-O-methyl modified nucleotide
  modified_base 74: mod_base = OTHER; note = 2'-O-methyl modified nucleotide
  modified_base 75: mod_base = OTHER; note = 2'-O-methyl modified nucleotide
  modified_base 76: mod_base = OTHER; note = 2'-O-methyl modified nucleotide
  modified_base 77: mod_base = OTHER; note = 2'-O-methyl modified nucleotide
  modified_base 78: mod_base = OTHER; note = 2'-O-methyl modified nucleotide
  modified_base 79: mod_base = OTHER; note = 2'-O-methyl modified nucleotide
  modified_base 80: mod_base = OTHER; note = 2'-O-methyl modified nucleotide
  modified_base 81: mod_base = OTHER; note = 2'-O-methyl modified nucleotide
  modified_base 82: mod_base = OTHER; note = 2'-O-methyl modified nucleotide
  modified_base 83: mod_base = OTHER; note = 2'-O-methyl modified nucleotide
  modified_base 84: mod_base = OTHER; note = 2'-O-methyl modified nucleotide
  modified_base 85: mod_base = OTHER; note = 2'-O-methyl modified nucleotide
  modified_base 86: mod_base = OTHER; note = 2'-O-methyl modified nucleotide
  modified_base 87: mod_base = OTHER; note = 2'-O-methyl modified nucleotide
  modified_base 88: mod_base = OTHER; note = 2'-O-methyl modified nucleotide
  modified_base 89: mod_base = OTHER; note = 2'-O-methyl modified nucleotide
  modified_base 90: mod_base = OTHER; note = 2'-O-methyl modified nucleotide
  modified_base 91: mod_base = OTHER; note = 2'-O-methyl modified nucleotide
  modified_base 92: mod_base = OTHER; note = 2'-O-methyl modified nucleotide
  modified_base 93: mod_base = OTHER; note = 2'-O-methyl modified nucleotide
  modified_base 94: mod_base = OTHER; note = 2'-O-methyl modified nucleotide
  modified_base 95: mod_base = OTHER; note = 2'-O-methyl modified nucleotide
  modified_base 96: mod_base = OTHER; note = 2'-O-methyl modified nucleotide
  modified_base 124: mod_base = OTHER; note = Nucleotide with phosphorothioate linkage
  modified_base 125: mod_base = OTHER; note = 2'-O-methyl modified nucleotide with phosphorothioate linkage
  modified_base 126: mod_base = OTHER; note = 2'-O-methyl modified nucleotide with phosphorothioate linkage
  modified_base 127: mod_base = OTHER; note = 2'-O-methyl modified nucleotide
gctggtacacggcagggtcagttttagagctagaaatagcaagttaaaataaggctagtccgttatcaacttgaaaaagtggcaccgagtcggtgctccagaaccctgatagttgaccctgccgtgt

SEQ ID NO: 16490 - RNA, 126 nt, synthetic construct
  source 1..126: mol_type = other RNA
  modified_base 1: mod_base = OTHER; note = 2'-O-methyl modified nucleotide with phosphorothioate linkage
  modified_base 2: mod_base = OTHER; note = 2'-O-methyl modified nucleotide with phosphorothioate linkage
  modified_base 3: mod_base = OTHER; note = 2'-O-methyl modified nucleotide with phosphorothioate linkage
  modified_base 29: mod_base = OTHER; note = 2'-O-methyl modified nucleotide
  modified_base 30: mod_base = OTHER; note = 2'-O-methyl modified nucleotide
  modified_base 31: mod_base = OTHER; note = 2'-O-methyl modified nucleotide
  modified_base 32: mod_base = OTHER; note = 2'-O-methyl modified nucleotide
  modified_base 33: mod_base = OTHER; note = 2'-O-methyl modified nucleotide
  modified_base 34: mod_base = OTHER; note = 2'-O-methyl modified nucleotide
  modified_base 35: mod_base = OTHER; note = 2'-O-methyl modified nucleotide
  modified_base 36: mod_base = OTHER; note = 2'-O-methyl modified nucleotide
  modified_base 37: mod_base = OTHER; note = 2'-O-methyl modified nucleotide
  modified_base 38: mod_base = OTHER; note = 2'-O-methyl modified nucleotide
  modified_base 39: mod_base = OTHER; note = 2'-O-methyl modified nucleotide
  modified_base 40: mod_base = OTHER; note = 2'-O-methyl modified nucleotide
  modified_base 69: mod_base = OTHER; note = 2'-O-methyl modified nucleotide
  modified_base 70: mod_base = OTHER; note = 2'-O-methyl modified nucleotide
  modified_base 71: mod_base = OTHER; note = 2'-O-methyl modified nucleotide
  modified_base 72: mod_base = OTHER; note = 2'-O-methyl modified nucleotide
  modified_base 73: mod_base = OTHER; note = 2'-O-methyl modified nucleotide
  modified_base 74: mod_base = OTHER; note = 2'-O-methyl modified nucleotide
  modified_base 75: mod_base = OTHER; note = 2'-O-methyl modified nucleotide
  modified_base 76: mod_base = OTHER; note = 2'-O-methyl modified nucleotide
  modified_base 77: mod_base = OTHER; note = 2'-O-methyl modified nucleotide
  modified_base 78: mod_base = OTHER; note = 2'-O-methyl modified nucleotide
  modified_base 79: mod_base = OTHER; note = 2'-O-methyl modified nucleotide
  modified_base 80: mod_base = OTHER; note = 2'-O-methyl modified nucleotide
  modified_base 81: mod_base = OTHER; note = 2'-O-methyl modified nucleotide
  modified_base 82: mod_base = OTHER; note = 2'-O-methyl modified nucleotide
  modified_base 83: mod_base = OTHER; note = 2'-O-methyl modified nucleotide
  modified_base 84: mod_base = OTHER; note = 2'-O-methyl modified nucleotide
  modified_base 85: mod_base = OTHER; note = 2'-O-methyl modified nucleotide
  modified_base 86: mod_base = OTHER; note = 2'-O-methyl modified nucleotide
  modified_base 87: mod_base = OTHER; note = 2'-O-methyl modified nucleotide
  modified_base 88: mod_base = OTHER; note = 2'-O-methyl modified nucleotide
  modified_base 89: mod_base = OTHER; note = 2'-O-methyl modified nucleotide
  modified_base 90: mod_base = OTHER; note = 2'-O-methyl modified nucleotide
  modified_base 91: mod_base = OTHER; note = 2'-O-methyl modified nucleotide
  modified_base 92: mod_base = OTHER; note = 2'-O-methyl modified nucleotide
  modified_base 93: mod_base = OTHER; note = 2'-O-methyl modified nucleotide
  modified_base 94: mod_base = OTHER; note = 2'-O-methyl modified nucleotide
  modified_base 95: mod_base = OTHER; note = 2'-O-methyl modified nucleotide
  modified_base 96: mod_base = OTHER; note = 2'-O-methyl modified nucleotide
  modified_base 123: mod_base = OTHER; note = Nucleotide with phosphorothioate linkage
  modified_base 124: mod_base = OTHER; note = 2'-O-methyl modified nucleotide with phosphorothioate linkage
  modified_base 125: mod_base = OTHER; note = 2'-O-methyl modified nucleotide with phosphorothioate linkage
  modified_base 126: mod_base = OTHER; note = 2'-O-methyl modified nucleotide
gctggtacacggcagggtcagttttagagctagaaatagcaagttaaaataaggctagtccgttatcaacttgaaaaagtggcaccgagtcggtgctccagaaccctgatagttgaccctgccgtg

SEQ ID NO: 16491 - RNA, 125 nt, synthetic construct
  source 1..125: mol_type = other RNA
  modified_base 1: mod_base = OTHER; note = 2'-O-methyl modified nucleotide with phosphorothioate linkage
  modified_base 2: mod_base = OTHER; note = 2'-O-methyl modified nucleotide with phosphorothioate linkage
  modified_base 3: mod_base = OTHER; note = 2'-O-methyl modified nucleotide with phosphorothioate linkage
  modified_base 29: mod_base = OTHER; note = 2'-O-methyl modified nucleotide
  modified_base 30: mod_base = OTHER; note = 2'-O-methyl modified nucleotide
  modified_base 31: mod_base = OTHER; note = 2'-O-methyl modified nucleotide
  modified_base 32: mod_base = OTHER; note = 2'-O-methyl modified nucleotide
  modified_base 33: mod_base = OTHER; note = 2'-O-methyl modified nucleotide
  modified_base 34: mod_base = OTHER; note = 2'-O-methyl modified nucleotide
  modified_base 35: mod_base = OTHER; note = 2'-O-methyl modified nucleotide
  modified_base 36: mod_base = OTHER; note = 2'-O-methyl modified nucleotide
  modified_base 37: mod_base = OTHER; note = 2'-O-methyl modified nucleotide
  modified_base 38: mod_base = OTHER; note = 2'-O-methyl modified nucleotide
  modified_base 39: mod_base = OTHER; note = 2'-O-methyl modified nucleotide
  modified_base 40: mod_base = OTHER; note = 2'-O-methyl modified nucleotide
  modified_base 69: mod_base = OTHER; note = 2'-O-methyl modified nucleotide
  modified_base 70: mod_base = OTHER; note = 2'-O-methyl modified nucleotide
  modified_base 71: mod_base = OTHER; note = 2'-O-methyl modified nucleotide
  modified_base 72: mod_base = OTHER; note = 2'-O-methyl modified nucleotide
  modified_base 73: mod_base = OTHER; note = 2'-O-methyl modified nucleotide
  modified_base 74: mod_base = OTHER; note = 2'-O-methyl modified nucleotide
  modified_base 75: mod_base = OTHER; note = 2'-O-methyl modified nucleotide
  modified_base 76: mod_base = OTHER; note = 2'-O-methyl modified nucleotide
  modified_base 77: mod_base = OTHER; note = 2'-O-methyl modified nucleotide
  modified_base 78: mod_base = OTHER; note = 2'-O-methyl modified nucleotide
  modified_base 79: mod_base = OTHER; note = 2'-O-methyl modified nucleotide
  modified_base 80: mod_base = OTHER; note = 2'-O-methyl modified nucleotide
  modified_base 81: mod_base = OTHER; note = 2'-O-methyl modified nucleotide
  modified_base 82: mod_base = OTHER; note = 2'-O-methyl modified nucleotide
  modified_base 83: mod_base = OTHER; note = 2'-O-methyl modified nucleotide
  modified_base 84: mod_base = OTHER; note = 2'-O-methyl modified nucleotide
  modified_base 85: mod_base = OTHER; note = 2'-O-methyl modified nucleotide
  modified_base 86: mod_base = OTHER; note = 2'-O-methyl modified nucleotide
  modified_base 87: mod_base = OTHER; note = 2'-O-methyl modified nucleotide
  modified_base 88: mod_base = OTHER; note = 2'-O-methyl modified nucleotide
  modified_base 89: mod_base = OTHER; note = 2'-O-methyl modified nucleotide
  modified_base 90: mod_base = OTHER; note = 2'-O-methyl modified nucleotide
  modified_base 91: mod_base = OTHER; note = 2'-O-methyl modified nucleotide
  modified_base 92: mod_base = OTHER; note = 2'-O-methyl modified nucleotide
  modified_base 93: mod_base = OTHER; note = 2'-O-methyl modified nucleotide
  modified_base 94: mod_base = OTHER; note = 2'-O-methyl modified nucleotide
  modified_base 95: mod_base = OTHER; note = 2'-O-methyl modified nucleotide
  modified_base 96: mod_base = OTHER; note = 2'-O-methyl modified nucleotide
  modified_base 122: mod_base = OTHER; note = Nucleotide with phosphorothioate linkage
  modified_base 123: mod_base = OTHER; note = 2'-O-methyl modified nucleotide with phosphorothioate linkage
  modified_base 124: mod_base = OTHER; note = 2'-O-methyl modified nucleotide with phosphorothioate linkage
  modified_base 125: mod_base = OTHER; note = 2'-O-methyl modified nucleotide
gctggtacacggcagggtcagttttagagctagaaatagcaagttaaaataaggctagtccgttatcaacttgaaaaagtggcaccgagtcggtgctccagaaccctgatagttgaccctgccgt

SEQ ID NO: 16492 - RNA, 124 nt, synthetic construct
  source 1..124: mol_type = other RNA
  modified_base 1: mod_base = OTHER; note = 2'-O-methyl modified nucleotide with phosphorothioate linkage
  modified_base 2: mod_base = OTHER; note = 2'-O-methyl modified nucleotide with phosphorothioate linkage
  modified_base 3: mod_base = OTHER; note = 2'-O-methyl modified nucleotide with phosphorothioate linkage
  modified_base 29: mod_base = OTHER; note = 2'-O-methyl modified nucleotide
  modified_base 30: mod_base = OTHER; note = 2'-O-methyl modified nucleotide
  modified_base 31: mod_base = OTHER; note = 2'-O-methyl modified nucleotide
  modified_base 32: mod_base = OTHER; note = 2'-O-methyl modified nucleotide
  modified_base 33: mod_base = OTHER; note = 2'-O-methyl modified nucleotide
  modified_base 34: mod_base = OTHER; note = 2'-O-methyl modified nucleotide
  modified_base 35: mod_base = OTHER; note = 2'-O-methyl modified nucleotide
  modified_base 36: mod_base = OTHER; note = 2'-O-methyl modified nucleotide
  modified_base 37: mod_base = OTHER; note = 2'-O-methyl modified nucleotide
  modified_base 38: mod_base = OTHER; note = 2'-O-methyl modified nucleotide
  modified_base 39: mod_base = OTHER; note = 2'-O-methyl modified nucleotide
  modified_base 40: mod_base = OTHER; note = 2'-O-methyl modified nucleotide
  modified_base 69: mod_base = OTHER; note = 2'-O-methyl modified nucleotide
  modified_base 70: mod_base = OTHER; note = 2'-O-methyl modified nucleotide
  modified_base 71: mod_base = OTHER; note = 2'-O-methyl modified nucleotide
  modified_base 72: mod_base = OTHER; note = 2'-O-methyl modified nucleotide
  modified_base 73: mod_base = OTHER; note = 2'-O-methyl modified nucleotide
  modified_base 74: mod_base = OTHER; note = 2'-O-methyl modified nucleotide
  modified_base 75: mod_base = OTHER; note = 2'-O-methyl modified nucleotide
  modified_base 76: mod_base = OTHER; note = 2'-O-methyl modified nucleotide
  modified_base 77: mod_base = OTHER; note = 2'-O-methyl modified nucleotide
  modified_base 78: mod_base = OTHER; note = 2'-O-methyl modified nucleotide
  modified_base 79: mod_base = OTHER; note = 2'-O-methyl modified nucleotide
  modified_base 80: mod_base = OTHER; note = 2'-O-methyl modified nucleotide
  modified_base 81: mod_base = OTHER; note = 2'-O-methyl modified nucleotide
  modified_base 82: mod_base = OTHER; note = 2'-O-methyl modified nucleotide
  modified_base 83: mod_base = OTHER; note = 2'-O-methyl modified nucleotide
  modified_base 84: mod_base = OTHER; note = 2'-O-methyl modified nucleotide
  modified_base 85: mod_base = OTHER; note = 2'-O-methyl modified nucleotide
  modified_base 86: mod_base = OTHER; note = 2'-O-methyl modified nucleotide
  modified_base 87: mod_base = OTHER; note = 2'-O-methyl modified nucleotide
  modified_base 88: mod_base = OTHER; note = 2'-O-methyl modified nucleotide
  modified_base 89: mod_base = OTHER; note = 2'-O-methyl modified nucleotide
  modified_base 90: mod_base = OTHER; note = 2'-O-methyl modified nucleotide
  modified_base 91: mod_base = OTHER; note = 2'-O-methyl modified nucleotide
  modified_base 92: mod_base = OTHER; note = 2'-O-methyl modified nucleotide
  modified_base 93: mod_base = OTHER; note = 2'-O-methyl modified nucleotide
  modified_base 94: mod_base = OTHER; note = 2'-O-methyl modified nucleotide
  modified_base 95: mod_base = OTHER; note = 2'-O-methyl modified nucleotide
  modified_base 96: mod_base = OTHER; note = 2'-O-methyl modified nucleotide
  modified_base 121: mod_base = OTHER; note = Nucleotide with phosphorothioate linkage
  modified_base 122: mod_base = OTHER; note = 2'-O-methyl modified nucleotide with phosphorothioate linkage
  modified_base 123: mod_base = OTHER; note = 2'-O-methyl modified nucleotide with phosphorothioate linkage
  modified_base 124: mod_base = OTHER; note = 2'-O-methyl modified nucleotide
gctggtacacggcagggtcagttttagagctagaaatagcaagttaaaataaggctagtccgttatcaacttgaaaaagtggcaccgagtcggtgctccagaaccctgatagttgaccctgccg

SEQ ID NO: 16493 - RNA, 131 nt, synthetic construct
  source 1..131: mol_type = other RNA
  modified_base 1: mod_base = OTHER; note = 2'-O-methyl modified nucleotide with phosphorothioate linkage
  modified_base 2: mod_base = OTHER; note = 2'-O-methyl modified nucleotide with phosphorothioate linkage
  modified_base 3: mod_base = OTHER; note = 2'-O-methyl modified nucleotide with phosphorothioate linkage
  modified_base 29: mod_base = OTHER; note = 2'-O-methyl modified nucleotide
  modified_base 30: mod_base = OTHER; note = 2'-O-methyl modified nucleotide
  modified_base 31: mod_base = OTHER; note = 2'-O-methyl modified nucleotide
  modified_base 32: mod_base = OTHER; note = 2'-O-methyl modified nucleotide
  modified_base 33: mod_base = OTHER; note = 2'-O-methyl modified nucleotide
  modified_base 34: mod_base = OTHER; note = 2'-O-methyl modified nucleotide
  modified_base 35: mod_base = OTHER; note = 2'-O-methyl modified nucleotide
  modified_base 36: mod_base = OTHER; note = 2'-O-methyl modified nucleotide
  modified_base 37: mod_base = OTHER; note = 2'-O-methyl modified nucleotide
  modified_base 38: mod_base = OTHER; note = 2'-O-methyl modified nucleotide
  modified_base 39: mod_base = OTHER; note = 2'-O-methyl modified nucleotide
  modified_base 40: mod_base = OTHER; note = 2'-O-methyl modified nucleotide
  modified_base 69: mod_base = OTHER; note = 2'-O-methyl modified nucleotide
  modified_base 70: mod_base = OTHER; note = 2'-O-methyl modified nucleotide
  modified_base 71: mod_base = OTHER; note = 2'-O-methyl modified nucleotide
  modified_base 72: mod_base = OTHER; note = 2'-O-methyl modified nucleotide
  modified_base 73: mod_base = OTHER; note = 2'-O-methyl modified nucleotide
  modified_base 74: mod_base = OTHER; note = 2'-O-methyl modified nucleotide
  modified_base 75: mod_base = OTHER; note = 2'-O-methyl modified nucleotide
  modified_base 76: mod_base = OTHER; note = 2'-O-methyl modified nucleotide
  modified_base 77: mod_base = OTHER; note = 2'-O-methyl modified nucleotide
  modified_base 78: mod_base = OTHER; note = 2'-O-methyl modified nucleotide
  modified_base 79: mod_base = OTHER; note = 2'-O-methyl modified nucleotide
  modified_base 80: mod_base = OTHER; note = 2'-O-methyl modified nucleotide
  modified_base 81: mod_base = OTHER; note = 2'-O-methyl modified nucleotide
  modified_base 82: mod_base = OTHER; note = 2'-O-methyl modified nucleotide
  modified_base 83: mod_base = OTHER; note = 2'-O-methyl modified nucleotide
  modified_base 84: mod_base = OTHER; note = 2'-O-methyl modified nucleotide
  modified_base 85: mod_base = OTHER; note = 2'-O-methyl modified nucleotide
  modified_base 86: mod_base = OTHER; note = 2'-O-methyl modified nucleotide
  modified_base 87: mod_base = OTHER; note = 2'-O-methyl modified nucleotide
  modified_base 88: mod_base = OTHER; note = 2'-O-methyl modified nucleotide
  modified_base 89: mod_base = OTHER; note = 2'-O-methyl modified nucleotide
  modified_base 90: mod_base = OTHER; note = 2'-O-methyl modified nucleotide
  modified_base 91: mod_base = OTHER; note = 2'-O-methyl modified nucleotide
  modified_base 92: mod_base = OTHER; note = 2'-O-methyl modified nucleotide
  modified_base 93: mod_base = OTHER; note = 2'-O-methyl modified nucleotide
  modified_base 94: mod_base = OTHER; note = 2'-O-methyl modified nucleotide
  modified_base 95: mod_base = OTHER; note = 2'-O-methyl modified nucleotide
  modified_base 96: mod_base = OTHER; note = 2'-O-methyl modified nucleotide
  modified_base 128: mod_base = OTHER; note = Nucleotide with phosphorothioate linkage
  modified_base 129: mod_base = OTHER; note = 2'-O-methyl modified nucleotide with phosphorothioate linkage
  modified_base 130: mod_base = OTHER; note = 2'-O-methyl modified nucleotide with phosphorothioate linkage
  modified_base 131: mod_base = OTHER; note = 2'-O-methyl modified nucleotide
gctggtacacggcagggtcagttttagagctagaaatagcaagttaaaataaggctagtccgttatcaacttgaaaaagtggcaccgagtcggtgctatccagaaccctgatagttgaccctgccgtgtac

SEQ ID NO: 16494 - RNA, 130 nt, synthetic construct
  source 1..130: mol_type = other RNA
  modified_base 1: mod_base = OTHER; note = 2'-O-methyl modified nucleotide with phosphorothioate linkage
  modified_base 2: mod_base = OTHER; note = 2'-O-methyl modified nucleotide with phosphorothioate linkage
  modified_base 3: mod_base = OTHER; note = 2'-O-methyl modified nucleotide with phosphorothioate linkage
  modified_base 29: mod_base = OTHER; note = 2'-O-methyl modified nucleotide
  modified_base 30: mod_base = OTHER; note = 2'-O-methyl modified nucleotide
  modified_base 31: mod_base = OTHER; note = 2'-O-methyl modified nucleotide
  modified_base 32: mod_base = OTHER; note = 2'-O-methyl modified nucleotide
  modified_base 33: mod_base = OTHER; note = 2'-O-methyl modified nucleotide
  modified_base 34: mod_base = OTHER; note = 2'-O-methyl modified nucleotide
  modified_base 35: mod_base = OTHER; note = 2'-O-methyl modified nucleotide
  modified_base 36: mod_base = OTHER; note = 2'-O-methyl modified nucleotide
  modified_base 37: mod_base = OTHER; note = 2'-O-methyl modified nucleotide
  modified_base 38: mod_base = OTHER; note = 2'-O-methyl modified nucleotide
  modified_base 39: mod_base = OTHER; note = 2'-O-methyl modified nucleotide
  modified_base 40: mod_base = OTHER; note = 2'-O-methyl modified nucleotide
  modified_base 69: mod_base = OTHER; note = 2'-O-methyl modified nucleotide
  modified_base 70: mod_base = OTHER; note = 2'-O-methyl modified nucleotide
  modified_base 71: mod_base = OTHER; note = 2'-O-methyl modified nucleotide
  modified_base 72: mod_base = OTHER; note = 2'-O-methyl modified nucleotide
  modified_base 73: mod_base = OTHER; note = 2'-O-methyl modified nucleotide
  modified_base 74: mod_base = OTHER; note = 2'-O-methyl modified nucleotide
  modified_base 75: mod_base = OTHER; note = 2'-O-methyl modified nucleotide
  modified_base 76: mod_base = OTHER; note = 2'-O-methyl modified nucleotide
  modified_base 77: mod_base = OTHER; note = 2'-O-methyl modified nucleotide
  modified_base 78: mod_base = OTHER; note = 2'-O-methyl modified nucleotide
  modified_base 79: mod_base = OTHER; note = 2'-O-methyl modified nucleotide
  modified_base 80: mod_base = OTHER; note = 2'-O-methyl modified nucleotide
  modified_base 81: mod_base = OTHER; note = 2'-O-methyl modified nucleotide
  modified_base 82: mod_base = OTHER; note = 2'-O-methyl modified nucleotide
  modified_base 83: mod_base = OTHER; note = 2'-O-methyl modified nucleotide
  modified_base 84: mod_base = OTHER; note = 2'-O-methyl modified nucleotide
  modified_base 85: mod_base = OTHER; note = 2'-O-methyl modified nucleotide
  modified_base 86: mod_base = OTHER; note = 2'-O-methyl modified nucleotide
  modified_base 87: mod_base = OTHER; note = 2'-O-methyl modified nucleotide
  modified_base 88: mod_base = OTHER; note = 2'-O-methyl modified nucleotide
  modified_base 89: mod_base = OTHER; note = 2'-O-methyl modified nucleotide
  modified_base 90: mod_base = OTHER; note = 2'-O-methyl modified nucleotide
  modified_base 91: mod_base = OTHER; note = 2'-O-methyl modified nucleotide
  modified_base 92: mod_base = OTHER; note = 2'-O-methyl modified nucleotide
  modified_base 93: mod_base = OTHER; note = 2'-O-methyl modified nucleotide
  modified_base 94: mod_base = OTHER; note = 2'-O-methyl modified nucleotide
  modified_base 95: mod_base = OTHER; note = 2'-O-methyl modified nucleotide
  modified_base 96: mod_base = OTHER; note = 2'-O-methyl modified nucleotide
  modified_base 127: mod_base = OTHER; note = Nucleotide with phosphorothioate linkage
  modified_base 128: mod_base = OTHER; note = 2'-O-methyl modified nucleotide with phosphorothioate linkage
  modified_base 129: mod_base = OTHER; note = 2'-O-methyl modified nucleotide with phosphorothioate linkage
  modified_base 130: mod_base = OTHER; note = 2'-O-methyl modified nucleotide
gctggtacacggcagggtcagttttagagctagaaatagcaagttaaaataaggctagtccgttatcaacttgaaaaagtggcaccgagtcggtgctatccagaaccctgatagttgaccctgccgtgta

SEQ ID NO: 16495 - RNA, 129 nt, synthetic construct
  source 1..129: mol_type = other RNA
  modified_base 1: mod_base = OTHER; note = 2'-O-methyl modified nucleotide with phosphorothioate linkage
  modified_base 2: mod_base = OTHER; note = 2'-O-methyl modified nucleotide with phosphorothioate linkage
  modified_base 3: mod_base = OTHER; note = 2'-O-methyl modified nucleotide with phosphorothioate linkage
  modified_base 29: mod_base = OTHER; note = 2'-O-methyl modified nucleotide
  modified_base 30: mod_base = OTHER; note = 2'-O-methyl modified nucleotide
  modified_base 31: mod_base = OTHER; note = 2'-O-methyl modified nucleotide
  modified_base 32: mod_base = OTHER; note = 2'-O-methyl modified nucleotide
  modified_base 33: mod_base = OTHER; note = 2'-O-methyl modified nucleotide
  modified_base 34: mod_base = OTHER; note = 2'-O-methyl modified nucleotide
  modified_base 35: mod_base = OTHER; note = 2'-O-methyl modified nucleotide
  modified_base 36: mod_base = OTHER; note = 2'-O-methyl modified nucleotide
  modified_base 37: mod_base = OTHER; note = 2'-O-methyl modified nucleotide
  modified_base 38: mod_base = OTHER; note = 2'-O-methyl modified nucleotide
  modified_base 39: mod_base = OTHER; note = 2'-O-methyl modified nucleotide
  modified_base 40: mod_base = OTHER; note = 2'-O-methyl modified nucleotide
  modified_base 69: mod_base = OTHER; note = 2'-O-methyl modified nucleotide
  modified_base 70: mod_base = OTHER; note = 2'-O-methyl modified nucleotide
  modified_base 71: mod_base = OTHER; note = 2'-O-methyl modified nucleotide
  modified_base 72: mod_base = OTHER; note = 2'-O-methyl modified nucleotide
  modified_base 73: mod_base = OTHER; note = 2'-O-methyl modified nucleotide
  modified_base 74: mod_base = OTHER; note = 2'-O-methyl modified nucleotide
  modified_base 75: mod_base = OTHER; note = 2'-O-methyl modified nucleotide
  modified_base 76: mod_base = OTHER; note = 2'-O-methyl modified nucleotide
  modified_base 77: mod_base = OTHER; note = 2'-O-methyl modified nucleotide
  modified_base 78: mod_base = OTHER; note = 2'-O-methyl modified nucleotide
  modified_base 79: mod_base = OTHER; note = 2'-O-methyl modified nucleotide
  modified_base 80: mod_base = OTHER; note = 2'-O-methyl modified nucleotide
  modified_base 81: mod_base = OTHER; note = 2'-O-methyl modified nucleotide
  modified_base 82: mod_base = OTHER; note = 2'-O-methyl modified nucleotide
  modified_base 83: mod_base = OTHER; note = 2'-O-methyl modified nucleotide
  modified_base 84: mod_base = OTHER; note = 2'-O-methyl modified nucleotide
  modified_base 85: mod_base = OTHER; note = 2'-O-methyl modified nucleotide
  modified_base 86: mod_base = OTHER; note = 2'-O-methyl modified nucleotide
  modified_base 87: mod_base = OTHER; note = 2'-O-methyl modified nucleotide
  modified_base 88: mod_base = OTHER; note = 2'-O-methyl modified nucleotide
  modified_base 89: mod_base = OTHER; note = 2'-O-methyl modified nucleotide
  modified_base 90: mod_base = OTHER; note = 2'-O-methyl modified nucleotide
  modified_base 91: mod_base = OTHER; note = 2'-O-methyl modified nucleotide
  modified_base 92: mod_base = OTHER; note = 2'-O-methyl modified nucleotide
  modified_base 93: mod_base = OTHER; note = 2'-O-methyl modified nucleotide
  modified_base 94: mod_base = OTHER; note = 2'-O-methyl modified nucleotide
  modified_base 95: mod_base = OTHER; note = 2'-O-methyl modified nucleotide
  modified_base 96: mod_base = OTHER; note = 2'-O-methyl modified nucleotide
  modified_base 126: mod_base = OTHER; note = Nucleotide with phosphorothioate linkage
  modified_base 127: mod_base = OTHER; note = 2'-O-methyl modified nucleotide with phosphorothioate linkage
  modified_base 128: mod_base = OTHER; note = 2'-O-methyl modified nucleotide with phosphorothioate linkage
  modified_base 129: mod_base = OTHER; note = 2'-O-methyl modified nucleotide
gctggtacacggcagggtcagttttagagctagaaatagcaagttaaaataaggctagtccgttatcaacttgaaaaagtggcaccgagtcggtgctatccagaaccctgatagttgaccctgccgtgt

SEQ ID NO: 16496 - RNA, 128 nt, synthetic construct
  source 1..128: mol_type = other RNA
  modified_base 1: mod_base = OTHER; note = 2'-O-methyl modified nucleotide with phosphorothioate linkage
  modified_base 2: mod_base = OTHER; note = 2'-O-methyl modified nucleotide with phosphorothioate linkage
  modified_base 3: mod_base = OTHER; note = 2'-O-methyl modified nucleotide with phosphorothioate linkage
  modified_base 29: mod_base = OTHER; note = 2'-O-methyl modified nucleotide
  modified_base 30: mod_base = OTHER; note = 2'-O-methyl modified nucleotide
  modified_base 31: mod_base = OTHER; note = 2'-O-methyl modified nucleotide
  modified_base 32: mod_base = OTHER; note = 2'-O-methyl modified nucleotide
  modified_base 33: mod_base = OTHER; note = 2'-O-methyl modified nucleotide
  modified_base 34: mod_base = OTHER; note = 2'-O-methyl modified nucleotide
  modified_base 35: mod_base = OTHER; note = 2'-O-methyl modified nucleotide
  modified_base 36: mod_base = OTHER; note = 2'-O-methyl modified nucleotide
  modified_base 37: mod_base = OTHER; note = 2'-O-methyl modified nucleotide
  modified_base 38: mod_base = OTHER; note = 2'-O-methyl modified nucleotide
  modified_base 39: mod_base = OTHER; note = 2'-O-methyl modified nucleotide
  modified_base 40: mod_base = OTHER; note = 2'-O-methyl modified nucleotide
  modified_base 69: mod_base = OTHER; note = 2'-O-methyl modified nucleotide
  modified_base 70: mod_base = OTHER; note = 2'-O-methyl modified nucleotide
  modified_base 71: mod_base = OTHER; note = 2'-O-methyl modified nucleotide
  modified_base 72: mod_base = OTHER; note = 2'-O-methyl modified nucleotide
  modified_base 73: mod_base = OTHER; note = 2'-O-methyl modified nucleotide
  modified_base 74: mod_base = OTHER; note = 2'-O-methyl modified nucleotide
  modified_base 75: mod_base = OTHER; note = 2'-O-methyl modified nucleotide
  modified_base 76: mod_base = OTHER; note = 2'-O-methyl modified nucleotide
  modified_base 77: mod_base = OTHER; note = 2'-O-methyl modified nucleotide
  modified_base 78: mod_base = OTHER; note = 2'-O-methyl modified nucleotide
  modified_base 79: mod_base = OTHER; note = 2'-O-methyl modified nucleotide
  modified_base 80: mod_base = OTHER; note = 2'-O-methyl modified nucleotide
  modified_base 81: mod_base = OTHER; note = 2'-O-methyl modified nucleotide
  modified_base 82: mod_base = OTHER; note = 2'-O-methyl modified nucleotide
  modified_base 83: mod_base = OTHER; note = 2'-O-methyl modified nucleotide
  modified_base 84: mod_base = OTHER; note = 2'-O-methyl modified nucleotide
  modified_base 85: mod_base = OTHER; note = 2'-O-methyl modified nucleotide
  modified_base 86: mod_base = OTHER; note = 2'-O-methyl modified nucleotide
  modified_base 87: mod_base = OTHER; note = 2'-O-methyl modified nucleotide
  modified_base 88: mod_base = OTHER; note = 2'-O-methyl modified nucleotide
  modified_base 89: mod_base = OTHER; note = 2'-O-methyl modified nucleotide
  modified_base 90: mod_base = OTHER; note = 2'-O-methyl modified nucleotide
  modified_base 91: mod_base = OTHER; note = 2'-O-methyl modified nucleotide
  modified_base 92: mod_base = OTHER; note = 2'-O-methyl modified nucleotide
  modified_base 93: mod_base = OTHER; note = 2'-O-methyl modified nucleotide
  modified_base 94: mod_base = OTHER; note = 2'-O-methyl modified nucleotide
  modified_base 95: mod_base = OTHER; note = 2'-O-methyl modified nucleotide
  modified_base 96: mod_base = OTHER; note = 2'-O-methyl modified nucleotide
  modified_base 125: mod_base = OTHER; note = Nucleotide with phosphorothioate linkage
  modified_base 126: mod_base = OTHER; note = 2'-O-methyl modified nucleotide with phosphorothioate linkage
  modified_base 127: mod_base = OTHER; note = 2'-O-methyl modified nucleotide with phosphorothioate linkage
  modified_base 128: mod_base = OTHER; note = 2'-O-methyl modified nucleotide
gctggtacacggcagggtcagttttagagctagaaatagcaagttaaaataaggctagtccgttatcaacttgaaaaagtggcaccgagtcggtgctatccagaaccctgatagttgaccctgccgtg

SEQ ID NO: 16497 - RNA, 127 nt, synthetic construct
  source 1..127: mol_type = other RNA
  modified_base 1: mod_base = OTHER; note = 2'-O-methyl modified nucleotide with phosphorothioate linkage
  modified_base 2: mod_base = OTHER; note = 2'-O-methyl modified nucleotide with phosphorothioate linkage
  modified_base 3: mod_base = OTHER; note = 2'-O-methyl modified nucleotide with phosphorothioate linkage
  modified_base 29: mod_base = OTHER; note = 2'-O-methyl modified nucleotide
  modified_base 30: mod_base = OTHER; note = 2'-O-methyl modified nucleotide
  modified_base 31: mod_base = OTHER; note = 2'-O-methyl modified nucleotide
  modified_base 32: mod_base = OTHER; note = 2'-O-methyl modified nucleotide
  modified_base 33: mod_base = OTHER; note = 2'-O-methyl modified nucleotide
  modified_base 34: mod_base = OTHER; note = 2'-O-methyl modified nucleotide
  modified_base 35: mod_base = OTHER; note = 2'-O-methyl modified nucleotide
  modified_base 36: mod_base = OTHER; note = 2'-O-methyl modified nucleotide
  modified_base 37: mod_base = OTHER; note = 2'-O-methyl modified nucleotide
  modified_base 38: mod_base = OTHER; note = 2'-O-methyl modified nucleotide
  modified_base 39: mod_base = OTHER; note = 2'-O-methyl modified nucleotide
  modified_base 40: mod_base = OTHER; note = 2'-O-methyl modified nucleotide
  modified_base 69: mod_base = OTHER; note = 2'-O-methyl modified nucleotide
  modified_base 70: mod_base = OTHER; note = 2'-O-methyl modified nucleotide
  modified_base 71: mod_base = OTHER; note = 2'-O-methyl modified nucleotide
  modified_base 72: mod_base = OTHER; note = 2'-O-methyl modified nucleotide
  modified_base 73: mod_base = OTHER; note = 2'-O-methyl modified nucleotide
  modified_base 74: mod_base = OTHER; note = 2'-O-methyl modified nucleotide
  modified_base 75: mod_base = OTHER; note = 2'-O-methyl modified nucleotide
  modified_base 76: mod_base = OTHER; note = 2'-O-methyl modified nucleotide
  modified_base 77: mod_base = OTHER; note = 2'-O-methyl modified nucleotide
  modified_base 78: mod_base = OTHER; note = 2'-O-methyl modified nucleotide
  modified_base 79: mod_base = OTHER; note = 2'-O-methyl modified nucleotide
  modified_base 80: mod_base = OTHER; note = 2'-O-methyl modified nucleotide
  modified_base 81: mod_base = OTHER; note = 2'-O-methyl modified nucleotide
  modified_base 82: mod_base = OTHER; note = 2'-O-methyl modified nucleotide
  modified_base 83: mod_base = OTHER; note = 2'-O-methyl modified nucleotide
  modified_base 84: mod_base = OTHER; note = 2'-O-methyl modified nucleotide
  modified_base 85: mod_base = OTHER; note = 2'-O-methyl modified nucleotide
  modified_base 86: mod_base = OTHER; note = 2'-O-methyl modified nucleotide
  modified_base 87: mod_base = OTHER; note = 2'-O-methyl modified nucleotide
  modified_base 88: mod_base = OTHER; note = 2'-O-methyl modified nucleotide
  modified_base 89: mod_base = OTHER; note = 2'-O-methyl modified nucleotide
  modified_base 90: mod_base = OTHER; note = 2'-O-methyl modified nucleotide
  modified_base 91: mod_base = OTHER; note = 2'-O-methyl modified nucleotide
  modified_base 92: mod_base = OTHER; note = 2'-O-methyl modified nucleotide
  modified_base 93: mod_base = OTHER; note = 2'-O-methyl modified nucleotide
  modified_base 94: mod_base = OTHER; note = 2'-O-methyl modified nucleotide
  modified_base 95: mod_base = OTHER; note = 2'-O-methyl modified nucleotide
  modified_base 96: mod_base = OTHER; note = 2'-O-methyl modified nucleotide
  modified_base 124: mod_base = OTHER; note = Nucleotide with phosphorothioate linkage
  modified_base 125: mod_base = OTHER; note = 2'-O-methyl modified nucleotide with phosphorothioate linkage
  modified_base 126: mod_base = OTHER; note = 2'-O-methyl modified nucleotide with phosphorothioate linkage
  modified_base 127: mod_base = OTHER; note = 2'-O-methyl modified nucleotide
gctggtacacggcagggtcagttttagagctagaaatagcaagttaaaataaggctagtccgttatcaacttgaaaaagtggcaccgagtcggtgctatccagaaccctgatagttgaccctgccgt

SEQ ID NO: 16498 - RNA, 126 nt, synthetic construct
  source 1..126: mol_type = other RNA
  modified_base 1: mod_base = OTHER; note = 2'-O-methyl modified nucleotide with phosphorothioate linkage
  modified_base 2: mod_base = OTHER; note = 2'-O-methyl modified nucleotide with phosphorothioate linkage
  modified_base 3: mod_base = OTHER; note = 2'-O-methyl modified nucleotide with phosphorothioate linkage
  modified_base 29: mod_base = OTHER; note = 2'-O-methyl modified nucleotide
  modified_base 30: mod_base = OTHER; note = 2'-O-methyl modified nucleotide
  modified_base 31: mod_base = OTHER; note = 2'-O-methyl modified nucleotide
  modified_base 32: mod_base = OTHER; note = 2'-O-methyl modified nucleotide
  modified_base 33: mod_base = OTHER; note = 2'-O-methyl modified nucleotide
  modified_base 34: mod_base = OTHER; note = 2'-O-methyl modified nucleotide
  modified_base 35: mod_base = OTHER; note = 2'-O-methyl modified nucleotide
  modified_base 36: mod_base = OTHER; note = 2'-O-methyl modified nucleotide
  modified_base 37: mod_base = OTHER; note = 2'-O-methyl modified nucleotide
  modified_base 38: mod_base = OTHER; note = 2'-O-methyl modified nucleotide
  modified_base 39: mod_base = OTHER; note = 2'-O-methyl modified nucleotide
  modified_base 40: mod_base = OTHER; note = 2'-O-methyl modified nucleotide
  modified_base 69: mod_base = OTHER; note = 2'-O-methyl modified nucleotide
  modified_base 70: mod_base = OTHER; note = 2'-O-methyl modified nucleotide
  modified_base 71: mod_base = OTHER; note = 2'-O-methyl modified nucleotide
  modified_base 72: mod_base = OTHER; note = 2'-O-methyl modified nucleotide
  modified_base 73: mod_base = OTHER; note = 2'-O-methyl modified nucleotide
  modified_base 74: mod_base = OTHER; note = 2'-O-methyl modified nucleotide
  modified_base 75: mod_base = OTHER; note = 2'-O-methyl modified nucleotide
  modified_base 76: mod_base = OTHER; note = 2'-O-methyl modified nucleotide
  modified_base 77: mod_base = OTHER; note = 2'-O-methyl modified nucleotide
  modified_base 78: mod_base = OTHER; note = 2'-O-methyl modified nucleotide
  modified_base 79: mod_base = OTHER; note = 2'-O-methyl modified nucleotide
  modified_base 80: mod_base = OTHER; note = 2'-O-methyl modified nucleotide
  modified_base 81: mod_base = OTHER; note = 2'-O-methyl modified nucleotide
  modified_base 82: mod_base = OTHER; note = 2'-O-methyl modified nucleotide
  modified_base 83: mod_base = OTHER; note = 2'-O-methyl modified nucleotide
  modified_base 84: mod_base = OTHER; note = 2'-O-methyl modified nucleotide
  modified_base 85: mod_base = OTHER; note = 2'-O-methyl modified nucleotide
  modified_base 86: mod_base = OTHER; note = 2'-O-methyl modified nucleotide
  modified_base 87: mod_base = OTHER; note = 2'-O-methyl modified nucleotide
  modified_base 88: mod_base = OTHER; note = 2'-O-methyl modified nucleotide
  modified_base 89: mod_base = OTHER; note = 2'-O-methyl modified nucleotide
  modified_base 90: mod_base = OTHER; note = 2'-O-methyl modified nucleotide
  modified_base 91: mod_base = OTHER; note = 2'-O-methyl modified nucleotide
  modified_base 92: mod_base = OTHER; note = 2'-O-methyl modified nucleotide
  modified_base 93: mod_base = OTHER; note = 2'-O-methyl modified nucleotide
  modified_base 94: mod_base = OTHER; note = 2'-O-methyl modified nucleotide
  modified_base 95: mod_base = OTHER; note = 2'-O-methyl modified nucleotide
  modified_base 96: mod_base = OTHER; note = 2'-O-methyl modified nucleotide
  modified_base 123: mod_base = OTHER; note = Nucleotide with phosphorothioate linkage
  modified_base 124: mod_base = OTHER; note = 2'-O-methyl modified nucleotide with phosphorothioate linkage
  modified_base 125: mod_base = OTHER; note = 2'-O-methyl modified nucleotide with phosphorothioate linkage
  modified_base 126: mod_base = OTHER; note = 2'-O-methyl modified nucleotide
gctggtacacggcagggtcagttttagagctagaaatagcaagttaaaataaggctagtccgttatcaacttgaaaaagtggcaccgagtcggtgctatccagaaccctgatagttgaccctgccg

SEQ ID NO: 16499 - RNA, 133 nt, synthetic construct
  source 1..133: mol_type = other RNA
  modified_base 1: mod_base = OTHER; note = 2'-O-methyl modified nucleotide with phosphorothioate linkage
  modified_base 2: mod_base = OTHER; note = 2'-O-methyl modified nucleotide with phosphorothioate linkage
  modified_base 3: mod_base = OTHER; note = 2'-O-methyl modified nucleotide with phosphorothioate linkage
  modified_base 29: mod_base = OTHER; note = 2'-O-methyl modified nucleotide
  modified_base 30: mod_base = OTHER; note = 2'-O-methyl modified nucleotide
  modified_base 31: mod_base = OTHER; note = 2'-O-methyl modified nucleotide
  modified_base 32: mod_base = OTHER; note = 2'-O-methyl modified nucleotide
  modified_base 33: mod_base = OTHER; note = 2'-O-methyl modified nucleotide
  modified_base 34: mod_base = OTHER; note = 2'-O-methyl modified nucleotide
  modified_base 35: mod_base = OTHER; note = 2'-O-methyl modified nucleotide
  modified_base 36: mod_base = OTHER; note = 2'-O-methyl modified nucleotide
  modified_base 37: mod_base = OTHER; note = 2'-O-methyl modified nucleotide
  modified_base 38: mod_base = OTHER; note = 2'-O-methyl modified nucleotide
  modified_base 39: mod_base = OTHER; note = 2'-O-methyl modified nucleotide
  modified_base 40: mod_base = OTHER; note = 2'-O-methyl modified nucleotide
  modified_base 69: mod_base = OTHER; note = 2'-O-methyl modified nucleotide
  modified_base 70: mod_base = OTHER; note = 2'-O-methyl modified nucleotide
  modified_base 71: mod_base = OTHER; note = 2'-O-methyl modified nucleotide
  modified_base 72: mod_base = OTHER; note = 2'-O-methyl modified nucleotide
  modified_base 73: mod_base = OTHER; note = 2'-O-methyl modified nucleotide
  modified_base 74: mod_base = OTHER; note = 2'-O-methyl modified nucleotide
  modified_base 75: mod_base = OTHER; note = 2'-O-methyl modified nucleotide
  modified_base 76: mod_base = OTHER; note = 2'-O-methyl modified nucleotide
  modified_base 77: mod_base = OTHER; note = 2'-O-methyl modified nucleotide
  modified_base 78: mod_base = OTHER; note = 2'-O-methyl modified nucleotide
  modified_base 79: mod_base = OTHER; note = 2'-O-methyl modified nucleotide
  modified_base 80: mod_base = OTHER; note = 2'-O-methyl modified nucleotide
  modified_base 81: mod_base = OTHER; note = 2'-O-methyl modified nucleotide
  modified_base 82: mod_base = OTHER; note = 2'-O-methyl modified nucleotide
  modified_base 83: mod_base = OTHER; note = 2'-O-methyl modified nucleotide
  modified_base 84: mod_base = OTHER; note = 2'-O-methyl modified nucleotide
  modified_base 85: mod_base = OTHER; note = 2'-O-methyl modified nucleotide
  modified_base 86: mod_base = OTHER; note = 2'-O-methyl modified nucleotide
  modified_base 87: mod_base = OTHER; note = 2'-O-methyl modified nucleotide
  modified_base 88: mod_base = OTHER; note = 2'-O-methyl modified nucleotide
  modified_base 89: mod_base = OTHER; note = 2'-O-methyl modified nucleotide
  modified_base 90: mod_base = OTHER; note = 2'-O-methyl modified nucleotide
  modified_base 91: mod_base = OTHER; note = 2'-O-methyl modified nucleotide
  modified_base 92: mod_base = OTHER; note = 2'-O-methyl modified nucleotide
  modified_base 93: mod_base = OTHER; note = 2'-O-methyl modified nucleotide
  modified_base 94: mod_base = OTHER; note = 2'-O-methyl modified nucleotide
  modified_base 95: mod_base = OTHER; note = 2'-O-methyl modified nucleotide
  modified_base 96: mod_base = OTHER; note = 2'-O-methyl modified nucleotide
  modified_base 130: mod_base = OTHER; note = Nucleotide with phosphorothioate linkage
  modified_base 131: mod_base = OTHER; note = 2'-O-methyl modified nucleotide with phosphorothioate linkage
  modified_base 132: mod_base = OTHER; note = 2'-O-methyl modified nucleotide with phosphorothioate linkage
  modified_base 133: mod_base = OTHER; note = 2'-O-methyl modified nucleotide
gctggtacacggcagggtcagttttagagctagaaatagcaagttaaaataaggctagtccgttatcaacttgaaaaagtggcaccgagtcggtgcgatatccagaaccctgatagttgaccctgccgtgtac

SEQ ID NO: 16500 - RNA, 132 nt, synthetic construct
  source 1..132: mol_type = other RNA
  modified_base 1: mod_base = OTHER; note = 2'-O-methyl modified nucleotide with phosphorothioate linkage
  modified_base 2: mod_base = OTHER; note = 2'-O-methyl modified nucleotide with phosphorothioate linkage
  modified_base 3: mod_base = OTHER; note = 2'-O-methyl modified nucleotide with phosphorothioate linkage
  modified_base 29: mod_base = OTHER; note = 2'-O-methyl modified nucleotide
  modified_base 30: mod_base = OTHER; note = 2'-O-methyl modified nucleotide
  modified_base 31: mod_base = OTHER; note = 2'-O-methyl modified nucleotide
  modified_base 32: mod_base = OTHER; note = 2'-O-methyl modified nucleotide
  modified_base 33: mod_base = OTHER; note = 2'-O-methyl modified nucleotide
  modified_base 34: mod_base = OTHER; note = 2'-O-methyl modified nucleotide
  modified_base 35: mod_base = OTHER; note = 2'-O-methyl modified nucleotide
  modified_base 36: mod_base = OTHER; note = 2'-O-methyl modified nucleotide
  modified_base 37: mod_base = OTHER; note = 2'-O-methyl modified nucleotide
  modified_base 38: mod_base = OTHER; note = 2'-O-methyl modified nucleotide
  modified_base 39: mod_base = OTHER; note = 2'-O-methyl modified nucleotide
  modified_base 40: mod_base = OTHER; note = 2'-O-methyl modified nucleotide
  modified_base 69: mod_base = OTHER; note = 2'-O-methyl modified nucleotide
  modified_base 70: mod_base = OTHER; note = 2'-O-methyl modified nucleotide
  modified_base 71: mod_base = OTHER; note = 2'-O-methyl modified nucleotide
  modified_base 72: mod_base = OTHER; note = 2'-O-methyl modified nucleotide
  modified_base 73: mod_base = OTHER; note = 2'-O-methyl modified nucleotide
  modified_base 74: mod_base = OTHER; note = 2'-O-methyl modified nucleotide
  modified_base 75: mod_base = OTHER; note = 2'-O-methyl modified nucleotide
  modified_base 76: mod_base = OTHER; note = 2'-O-methyl modified nucleotide
  modified_base 77: mod_base = OTHER; note = 2'-O-methyl modified nucleotide
  modified_base 78: mod_base = OTHER; note = 2'-O-methyl modified nucleotide
  modified_base 79: mod_base = OTHER; note = 2'-O-methyl modified nucleotide
  modified_base 80: mod_base = OTHER; note = 2'-O-methyl modified nucleotide
  modified_base 81: mod_base = OTHER; note = 2'-O-methyl modified nucleotide
  modified_base 82: mod_base = OTHER; note = 2'-O-methyl modified nucleotide
  modified_base 83: mod_base = OTHER; note = 2'-O-methyl modified nucleotide
  modified_base 84: mod_base = OTHER; note = 2'-O-methyl modified nucleotide
  modified_base 85: mod_base = OTHER; note = 2'-O-methyl modified nucleotide
  modified_base 86: mod_base = OTHER; note = 2'-O-methyl modified nucleotide
  modified_base 87: mod_base = OTHER; note = 2'-O-methyl modified nucleotide
  modified_base 88: mod_base = OTHER; note = 2'-O-methyl modified nucleotide
  modified_base 89: mod_base = OTHER; note = 2'-O-methyl modified nucleotide
  modified_base 90: mod_base = OTHER; note = 2'-O-methyl modified nucleotide
  modified_base 91: mod_base = OTHER; note = 2'-O-methyl modified nucleotide
  modified_base 92: mod_base = OTHER; note = 2'-O-methyl modified nucleotide
  modified_base 93: mod_base = OTHER; note = 2'-O-methyl modified nucleotide
  modified_base 94: mod_base = OTHER; note = 2'-O-methyl modified nucleotide
  modified_base 95: mod_base = OTHER; note = 2'-O-methyl modified nucleotide
  modified_base 96: mod_base = OTHER; note = 2'-O-methyl modified nucleotide
  modified_base 129: mod_base = OTHER; note = Nucleotide with phosphorothioate linkage
  modified_base 130: mod_base = OTHER; note = 2'-O-methyl modified nucleotide with phosphorothioate linkage
  modified_base 131: mod_base = OTHER; note = 2'-O-methyl modified nucleotide with phosphorothioate linkage
  modified_base 132: mod_base = OTHER; note = 2'-O-methyl modified nucleotide
gctggtacacggcagggtcagttttagagctagaaatagcaagttaaaataaggctagtccgttatcaacttgaaaaagtggcaccgagtcggtgcgatatccagaaccctgatagttgaccctgccgtgta

SEQ ID NO: 16501 - RNA, 131 nt, synthetic construct
  source 1..131: mol_type = other RNA
  modified_base 1: mod_base = OTHER; note = 2'-O-methyl modified nucleotide with phosphorothioate linkage
  modified_base 2: mod_base = OTHER; note = 2'-O-methyl modified nucleotide with phosphorothioate linkage
  modified_base 3: mod_base = OTHER; note = 2'-O-methyl modified nucleotide with phosphorothioate linkage
  modified_base 29: mod_base = OTHER; note = 2'-O-methyl modified nucleotide
  modified_base 30: mod_base = OTHER; note = 2'-O-methyl modified nucleotide
  modified_base 31: mod_base = OTHER; note = 2'-O-methyl modified nucleotide
  modified_base 32: mod_base = OTHER; note = 2'-O-methyl modified nucleotide
  modified_base 33: mod_base = OTHER; note = 2'-O-methyl modified nucleotide
  modified_base 34: mod_base = OTHER; note = 2'-O-methyl modified nucleotide
  modified_base 35: mod_base = OTHER; note = 2'-O-methyl modified nucleotide
  modified_base 36: mod_base = OTHER; note = 2'-O-methyl modified nucleotide
  modified_base 37: mod_base = OTHER; note = 2'-O-methyl modified nucleotide
  modified_base 38: mod_base = OTHER; note = 2'-O-methyl modified nucleotide
  modified_base 39: mod_base = OTHER; note = 2'-O-methyl modified nucleotide
  modified_base 40: mod_base = OTHER; note = 2'-O-methyl modified nucleotide
  modified_base 69: mod_base = OTHER; note = 2'-O-methyl modified nucleotide
  modified_base 70: mod_base = OTHER; note = 2'-O-methyl modified nucleotide
  modified_base 71: mod_base = OTHER; note = 2'-O-methyl modified nucleotide
  modified_base 72: mod_base = OTHER; note = 2'-O-methyl modified nucleotide
  modified_base 73: mod_base = OTHER; note = 2'-O-methyl modified nucleotide
  modified_base 74: mod_base = OTHER; note = 2'-O-methyl modified nucleotide
  modified_base 75: mod_base = OTHER; note = 2'-O-methyl modified nucleotide
  modified_base 76: mod_base = OTHER; note = 2'-O-methyl modified nucleotide
  modified_base 77: mod_base = OTHER; note = 2'-O-methyl modified nucleotide
  modified_base 78: mod_base = OTHER; note = 2'-O-methyl modified nucleotide
  modified_base 79: mod_base = OTHER; note = 2'-O-methyl modified nucleotide
  modified_base 80: mod_base = OTHER; note = 2'-O-methyl modified nucleotide
  modified_base 81: mod_base = OTHER; note = 2'-O-methyl modified nucleotide
  modified_base 82: mod_base = OTHER; note = 2'-O-methyl modified nucleotide
  modified_base 83: mod_base = OTHER; note = 2'-O-methyl modified nucleotide
  modified_base 84: mod_base = OTHER; note = 2'-O-methyl modified nucleotide
  modified_base 85: mod_base = OTHER; note = 2'-O-methyl modified nucleotide
  modified_base 86: mod_base = OTHER; note = 2'-O-methyl modified nucleotide
  modified_base 87: mod_base = OTHER; note = 2'-O-methyl modified nucleotide
  modified_base 88: mod_base = OTHER; note = 2'-O-methyl modified nucleotide
  modified_base 89: mod_base = OTHER; note = 2'-O-methyl modified nucleotide
  modified_base 90: mod_base = OTHER; note = 2'-O-methyl modified nucleotide
  modified_base 91: mod_base = OTHER; note = 2'-O-methyl modified nucleotide
  modified_base 92: mod_base = OTHER; note = 2'-O-methyl modified nucleotide
  modified_base 93: mod_base = OTHER; note = 2'-O-methyl modified nucleotide
  modified_base 94: mod_base = OTHER; note = 2'-O-methyl modified nucleotide
  modified_base 95: mod_base = OTHER; note = 2'-O-methyl modified nucleotide
  modified_base 96: mod_base = OTHER; note = 2'-O-methyl modified nucleotide
  modified_base 128: mod_base = OTHER; note = Nucleotide with phosphorothioate linkage
  modified_base 129: mod_base = OTHER; note = 2'-O-methyl modified nucleotide with phosphorothioate linkage
  modified_base 130: mod_base = OTHER; note = 2'-O-methyl modified nucleotide with phosphorothioate linkage
  modified_base 131: mod_base = OTHER; note = 2'-O-methyl modified nucleotide
gctggtacacggcagggtcagttttagagctagaaatagcaagttaaaataaggctagtccgttatcaacttgaaaaagtggcaccgagtcggtgcgatatccagaaccctgatagttgaccctgccgtgt

SEQ ID NO: 16502 - RNA, 130 nt, synthetic construct
  source 1..130: mol_type = other RNA
  modified_base 1: mod_base = OTHER; note = 2'-O-methyl modified nucleotide with phosphorothioate linkage
  modified_base 2: mod_base = OTHER; note = 2'-O-methyl modified nucleotide with phosphorothioate linkage
  modified_base 3: mod_base = OTHER; note = 2'-O-methyl modified nucleotide with phosphorothioate linkage
  modified_base 29: mod_base = OTHER; note = 2'-O-methyl modified nucleotide
  modified_base 30: mod_base = OTHER; note = 2'-O-methyl modified nucleotide
  modified_base 31: mod_base = OTHER; note = 2'-O-methyl modified nucleotide
  modified_base 32: mod_base = OTHER; note = 2'-O-methyl modified nucleotide
  modified_base 33: mod_base = OTHER; note = 2'-O-methyl modified nucleotide
  modified_base 34: mod_base = OTHER; note = 2'-O-methyl modified nucleotide
  modified_base 35: mod_base = OTHER; note = 2'-O-methyl modified nucleotide
  modified_base 36: mod_base = OTHER; note = 2'-O-methyl modified nucleotide
  modified_base 37: mod_base = OTHER; note = 2'-O-methyl modified nucleotide
  modified_base 38: mod_base = OTHER; note = 2'-O-methyl modified nucleotide
  modified_base 39: mod_base = OTHER; note = 2'-O-methyl modified nucleotide
  modified_base 40: mod_base = OTHER; note = 2'-O-methyl modified nucleotide
  modified_base 69: mod_base = OTHER; note = 2'-O-methyl modified nucleotide
  modified_base 70: mod_base = OTHER; note = 2'-O-methyl modified nucleotide
  modified_base 71: mod_base = OTHER; note = 2'-O-methyl modified nucleotide
  modified_base 72: mod_base = OTHER; note = 2'-O-methyl modified nucleotide
  modified_base 73: mod_base = OTHER; note = 2'-O-methyl modified nucleotide
  modified_base 74: mod_base = OTHER; note = 2'-O-methyl modified nucleotide
  modified_base 75: mod_base = OTHER; note = 2'-O-methyl modified nucleotide
  modified_base 76: mod_base = OTHER; note = 2'-O-methyl modified nucleotide
  modified_base 77: mod_base = OTHER; note = 2'-O-methyl modified nucleotide
  modified_base 78: mod_base = OTHER; note = 2'-O-methyl modified nucleotide
  modified_base 79: mod_base = OTHER; note = 2'-O-methyl modified nucleotide
  modified_base 80: mod_base = OTHER; note = 2'-O-methyl modified nucleotide
  modified_base 81: mod_base = OTHER; note = 2'-O-methyl modified nucleotide
  modified_base 82: mod_base = OTHER; note = 2'-O-methyl modified nucleotide
  modified_base 83: mod_base = OTHER; note = 2'-O-methyl modified nucleotide
  modified_base 84: mod_base = OTHER; note = 2'-O-methyl modified nucleotide
  modified_base 85: mod_base = OTHER; note = 2'-O-methyl modified nucleotide
  modified_base 86: mod_base = OTHER; note = 2'-O-methyl modified nucleotide
  modified_base 87: mod_base = OTHER; note = 2'-O-methyl modified nucleotide
  modified_base 88: mod_base = OTHER; note = 2'-O-methyl modified nucleotide
  modified_base 89: mod_base = OTHER; note = 2'-O-methyl modified nucleotide
  modified_base 90: mod_base = OTHER; note = 2'-O-methyl modified nucleotide
  modified_base 91: mod_base = OTHER; note = 2'-O-methyl modified nucleotide
  modified_base 92: mod_base = OTHER; note = 2'-O-methyl modified nucleotide
  modified_base 93: mod_base = OTHER; note = 2'-O-methyl modified nucleotide
  modified_base 94: mod_base = OTHER; note = 2'-O-methyl modified nucleotide
  modified_base 95: mod_base = OTHER; note = 2'-O-methyl modified nucleotide
  modified_base 96: mod_base = OTHER; note = 2'-O-methyl modified nucleotide
  modified_base 127: mod_base = OTHER; note = Nucleotide with phosphorothioate linkage
  modified_base 128: mod_base = OTHER; note = 2'-O-methyl modified nucleotide with phosphorothioate linkage
  modified_base 129: mod_base = OTHER; note = 2'-O-methyl modified nucleotide with phosphorothioate linkage
  modified_base 130: mod_base = OTHER; note = 2'-O-methyl modified nucleotide
gctggtacacggcagggtcagttttagagctagaaatagcaagttaaaataaggctagtccgttatcaacttgaaaaagtggcaccgagtcggtgcgatatccagaaccctgatagttgaccctgccgtg

SEQ ID NO: 16503 - RNA, 129 nt, synthetic construct
  source 1..129: mol_type = other RNA
  modified_base 1: mod_base = OTHER; note = 2'-O-methyl modified nucleotide with phosphorothioate linkage
  modified_base 2: mod_base = OTHER; note = 2'-O-methyl modified nucleotide with phosphorothioate linkage
  modified_base 3: mod_base = OTHER; note = 2'-O-methyl modified nucleotide with phosphorothioate linkage
  modified_base 29: mod_base = OTHER; note = 2'-O-methyl modified nucleotide
  modified_base 30: mod_base = OTHER; note = 2'-O-methyl modified nucleotide
  modified_base 31: mod_base = OTHER; note = 2'-O-methyl modified nucleotide
  modified_base 32: mod_base = OTHER; note = 2'-O-methyl modified nucleotide
  modified_base 33: mod_base = OTHER; note = 2'-O-methyl modified nucleotide
  modified_base 34: mod_base = OTHER; note = 2'-O-methyl modified nucleotide
  modified_base 35: mod_base = OTHER; note = 2'-O-methyl modified nucleotide
  modified_base 36: mod_base = OTHER; note = 2'-O-methyl modified nucleotide
  modified_base 37: mod_base = OTHER; note = 2'-O-methyl modified nucleotide
  modified_base 38: mod_base = OTHER; note = 2'-O-methyl modified nucleotide
  modified_base 39: mod_base = OTHER; note = 2'-O-methyl modified nucleotide
  modified_base 40: mod_base = OTHER; note = 2'-O-methyl modified nucleotide
  modified_base 69: mod_base = OTHER; note = 2'-O-methyl modified nucleotide
  modified_base 70: mod_base = OTHER; note = 2'-O-methyl modified nucleotide
  modified_base 71: mod_base = OTHER; note = 2'-O-methyl modified nucleotide
  modified_base 72: mod_base = OTHER; note = 2'-O-methyl modified nucleotide
  modified_base 73: mod_base = OTHER; note = 2'-O-methyl modified nucleotide
  modified_base 74: mod_base = OTHER; note = 2'-O-methyl modified nucleotide
  modified_base 75: mod_base = OTHER; note = 2'-O-methyl modified nucleotide
  modified_base 76: mod_base = OTHER; note = 2'-O-methyl modified nucleotide
  modified_base 77: mod_base = OTHER; note = 2'-O-methyl modified nucleotide
  modified_base 78: mod_base = OTHER; note = 2'-O-methyl modified nucleotide
  modified_base 79: mod_base = OTHER; note = 2'-O-methyl modified nucleotide
  modified_base 80: mod_base = OTHER; note = 2'-O-methyl modified nucleotide
  modified_base 81: mod_base = OTHER; note = 2'-O-methyl modified nucleotide
  modified_base 82: mod_base = OTHER; note = 2'-O-methyl modified nucleotide
  modified_base 83: mod_base = OTHER; note = 2'-O-methyl modified nucleotide
  modified_base 84: mod_base = OTHER; note = 2'-O-methyl modified nucleotide
  modified_base 85: mod_base = OTHER; note = 2'-O-methyl modified nucleotide
  modified_base 86: mod_base = OTHER; note = 2'-O-methyl modified nucleotide
  modified_base 87: mod_base = OTHER; note = 2'-O-methyl modified nucleotide
  modified_base 88: mod_base = OTHER; note = 2'-O-methyl modified nucleotide
  modified_base 89: mod_base = OTHER; note = 2'-O-methyl modified nucleotide
  modified_base 90: mod_base = OTHER; note = 2'-O-methyl modified nucleotide
  modified_base 91: mod_base = OTHER; note = 2'-O-methyl modified nucleotide
  modified_base 92: mod_base = OTHER; note = 2'-O-methyl modified nucleotide
  modified_base 93: mod_base = OTHER; note = 2'-O-methyl modified nucleotide
  modified_base 94: mod_base = OTHER; note = 2'-O-methyl modified nucleotide
  modified_base 95: mod_base = OTHER; note = 2'-O-methyl modified nucleotide
  modified_base 96: mod_base = OTHER; note = 2'-O-methyl modified nucleotide
  modified_base 126: mod_base = OTHER; note = Nucleotide with phosphorothioate linkage
  modified_base 127: mod_base = OTHER; note = 2'-O-methyl modified nucleotide with phosphorothioate linkage
  modified_base 128: mod_base = OTHER; note = 2'-O-methyl modified nucleotide with phosphorothioate linkage
  modified_base 129: mod_base = OTHER; note = 2'-O-methyl modified nucleotide
gctggtacacggcagggtcagttttagagctagaaatagcaagttaaaataaggctagtccgttatcaacttgaaaaagtggcaccgagtcggtgcgatatccagaaccctgatagttgaccctgccgt

SEQ ID NO: 16504 - RNA, 128 nt, synthetic construct
  source 1..128: mol_type = other RNA
  modified_base 1: mod_base = OTHER; note = 2'-O-methyl modified nucleotide with phosphorothioate linkage
  modified_base 2: mod_base = OTHER; note = 2'-O-methyl modified nucleotide with phosphorothioate linkage
  modified_base 3: mod_base = OTHER; note = 2'-O-methyl modified nucleotide with phosphorothioate linkage
  modified_base 29: mod_base = OTHER; note = 2'-O-methyl modified nucleotide
  modified_base 30: mod_base = OTHER; note = 2'-O-methyl modified nucleotide
  modified_base 31: mod_base = OTHER; note = 2'-O-methyl modified nucleotide
  modified_base 32: mod_base = OTHER; note = 2'-O-methyl modified nucleotide
  modified_base 33: mod_base = OTHER; note = 2'-O-methyl modified nucleotide
  modified_base 34: mod_base = OTHER; note = 2'-O-methyl modified nucleotide
  modified_base 35: mod_base = OTHER; note = 2'-O-methyl modified nucleotide
  modified_base 36: mod_base = OTHER; note = 2'-O-methyl modified nucleotide
  modified_base 37: mod_base = OTHER; note = 2'-O-methyl modified nucleotide
  modified_base 38: mod_base = OTHER; note = 2'-O-methyl modified nucleotide
  modified_base 39: mod_base = OTHER; note = 2'-O-methyl modified nucleotide
  modified_base 40: mod_base = OTHER; note = 2'-O-methyl modified nucleotide
  modified_base 69: mod_base = OTHER; note = 2'-O-methyl modified nucleotide
  modified_base 70: mod_base = OTHER; note = 2'-O-methyl modified nucleotide
  modified_base 71: mod_base = OTHER; note = 2'-O-methyl modified nucleotide
  modified_base 72: mod_base = OTHER; note = 2'-O-methyl modified nucleotide
  modified_base 73: mod_base = OTHER; note = 2'-O-methyl modified nucleotide
  modified_base 74: mod_base = OTHER; note = 2'-O-methyl modified nucleotide
  modified_base 75: mod_base = OTHER; note = 2'-O-methyl modified nucleotide
  modified_base 76: mod_base = OTHER; note = 2'-O-methyl modified nucleotide
  modified_base 77: mod_base = OTHER; note = 2'-O-methyl modified nucleotide
  modified_base 78: mod_base = OTHER; note = 2'-O-methyl modified nucleotide
  modified_base 79: mod_base = OTHER; note = 2'-O-methyl modified nucleotide
  modified_base 80: mod_base = OTHER; note = 2'-O-methyl modified nucleotide
  modified_base 81: mod_base = OTHER; note = 2'-O-methyl modified nucleotide
  modified_base 82: mod_base = OTHER; note = 2'-O-methyl modified nucleotide
  modified_base 83: mod_base = OTHER; note = 2'-O-methyl modified nucleotide
  modified_base 84: mod_base = OTHER; note = 2'-O-methyl modified nucleotide
  modified_base 85: mod_base = OTHER; note = 2'-O-methyl modified nucleotide
  modified_base 86: mod_base = OTHER; note = 2'-O-methyl modified nucleotide
  modified_base 87: mod_base = OTHER; note = 2'-O-methyl modified nucleotide
  modified_base 88: mod_base = OTHER; note = 2'-O-methyl modified nucleotide
  modified_base 89: mod_base = OTHER; note = 2'-O-methyl modified nucleotide
  modified_base 90: mod_base = OTHER; note = 2'-O-methyl modified nucleotide
  modified_base 91: mod_base = OTHER; note = 2'-O-methyl modified nucleotide
  modified_base 92: mod_base = OTHER; note = 2'-O-methyl modified nucleotide
  modified_base 93: mod_base = OTHER; note = 2'-O-methyl modified nucleotide
  modified_base 94: mod_base = OTHER; note = 2'-O-methyl modified nucleotide
  modified_base 95: mod_base = OTHER; note = 2'-O-methyl modified nucleotide
  modified_base 96: mod_base = OTHER; note = 2'-O-methyl modified nucleotide
  modified_base 125: mod_base = OTHER; note = Nucleotide with phosphorothioate linkage
  modified_base 126: mod_base = OTHER; note = 2'-O-methyl modified nucleotide with phosphorothioate linkage
  modified_base 127: mod_base = OTHER; note = 2'-O-methyl modified nucleotide with phosphorothioate linkage
  modified_base 128: mod_base = OTHER; note = 2'-O-methyl modified nucleotide
gctggtacacggcagggtcagttttagagctagaaatagcaagttaaaataaggctagtccgttatcaacttgaaaaagtggcaccgagtcggtgcgatatccagaaccctgatagttgaccctgccg

SEQ ID NO: 16505 - RNA, 114 nt, synthetic construct
  source 1..114: mol_type = other RNA
  modified_base 1: mod_base = OTHER; note = 2'-O-methyl modified nucleotide with phosphorothioate linkage
  modified_base 2: mod_base = OTHER; note = 2'-O-methyl modified nucleotide with phosphorothioate linkage
  modified_base 3: mod_base = OTHER; note = 2'-O-methyl modified nucleotide with phosphorothioate linkage
  modified_base 29: mod_base = OTHER; note = 2'-O-methyl modified nucleotide
  modified_base 30: mod_base = OTHER; note = 2'-O-methyl modified nucleotide
  modified_base 31: mod_base = OTHER; note = 2'-O-methyl modified nucleotide
  modified_base 32: mod_base = OTHER; note = 2'-O-methyl modified nucleotide
  modified_base 33: mod_base = OTHER; note = 2'-O-methyl modified nucleotide
  modified_base 34: mod_base = OTHER; note = 2'-O-methyl modified nucleotide
  modified_base 35: mod_base = OTHER; note = 2'-O-methyl modified nucleotide
  modified_base 36: mod_base = OTHER; note = 2'-O-methyl modified nucleotide
  modified_base 37: mod_base = OTHER; note = 2'-O-methyl modified nucleotide
  modified_base 38: mod_base = OTHER; note = 2'-O-methyl modified nucleotide
  modified_base 39: mod_base = OTHER; note = 2'-O-methyl modified nucleotide
  modified_base 40: mod_base = OTHER; note = 2'-O-methyl modified nucleotide
  modified_base 69: mod_base = OTHER; note = 2'-O-methyl modified nucleotide
  modified_base 70: mod_base = OTHER; note = 2'-O-methyl modified nucleotide
  modified_base 71: mod_base = OTHER; note = 2'-O-methyl modified nucleotide
  modified_base 72: mod_base = OTHER; note = 2'-O-methyl modified nucleotide
  modified_base 73: mod_base = OTHER; note = 2'-O-methyl modified nucleotide
  modified_base 74: mod_base = OTHER; note = 2'-O-methyl modified nucleotide
  modified_base 75: mod_base = OTHER; note = 2'-O-methyl modified nucleotide
  modified_base 76: mod_base = OTHER; note = 2'-O-methyl modified nucleotide
  modified_base 77: mod_base = OTHER; note = 2'-O-methyl modified nucleotide
  modified_base 78: mod_base = OTHER; note = 2'-O-methyl modified nucleotide
  modified_base 79: mod_base = OTHER; note = 2'-O-methyl modified nucleotide
  modified_base 80: mod_base = OTHER; note = 2'-O-methyl modified nucleotide
  modified_base 81: mod_base = OTHER; note = 2'-O-methyl modified nucleotide
  modified_base 82: mod_base = OTHER; note = 2'-O-methyl modified nucleotide
  modified_base 83: mod_base = OTHER; note = 2'-O-methyl modified nucleotide
  modified_base 84: mod_base = OTHER; note = 2'-O-methyl modified nucleotide
  modified_base 85: mod_base = OTHER; note = 2'-O-methyl modified nucleotide
  modified_base 86: mod_base = OTHER; note = 2'-O-methyl modified nucleotide
  modified_base 87: mod_base = OTHER; note = 2'-O-methyl modified nucleotide
  modified_base 88: mod_base = OTHER; note = 2'-O-methyl modified nucleotide
  modified_base 89: mod_base = OTHER; note = 2'-O-methyl modified nucleotide
  modified_base 90: mod_base = OTHER; note = 2'-O-methyl modified nucleotide
  modified_base 91: mod_base = OTHER; note = 2'-O-methyl modified nucleotide
  modified_base 92: mod_base = OTHER; note = 2'-O-methyl modified nucleotide
  modified_base 93: mod_base = OTHER; note = 2'-O-methyl modified nucleotide
  modified_base 94: mod_base = OTHER; note = 2'-O-methyl modified nucleotide
  modified_base 95: mod_base = OTHER; note = 2'-O-methyl modified nucleotide
  modified_base 96: mod_base = OTHER; note = 2'-O-methyl modified nucleotide
  modified_base 111: mod_base = OTHER; note = Nucleotide with phosphorothioate linkage
  modified_base 112: mod_base = OTHER; note = 2'-O-methyl modified nucleotide with phosphorothioate linkage
  modified_base 113: mod_base = OTHER; note = 2'-O-methyl modified nucleotide with phosphorothioate linkage
  modified_base 114: mod_base = OTHER; note = 2'-O-methyl modified nucleotide
gctggtacacggcagggtcagttttagagctagaaatagcaagttaaaataaggctagtccgttatcaacttgaaaaagtggcaccgagtcggtgcagaacccctgccgtgtac

SEQ ID NO: 16506 - RNA, 113 nt, synthetic construct
  source 1..113: mol_type = other RNA
  modified_base 1: mod_base = OTHER; note = 2'-O-methyl modified nucleotide with phosphorothioate linkage
  modified_base 2: mod_base = OTHER; note = 2'-O-methyl modified nucleotide with phosphorothioate linkage
  modified_base 3: mod_base = OTHER; note = 2'-O-methyl modified nucleotide with phosphorothioate linkage
  modified_base 29: mod_base = OTHER; note = 2'-O-methyl modified nucleotide
  modified_base 30: mod_base = OTHER; note = 2'-O-methyl modified nucleotide
  modified_base 31: mod_base = OTHER; note = 2'-O-methyl modified nucleotide
  modified_base 32: mod_base = OTHER; note = 2'-O-methyl modified nucleotide
  modified_base 33: mod_base = OTHER; note = 2'-O-methyl modified nucleotide
  modified_base 34: mod_base = OTHER; note = 2'-O-methyl modified nucleotide
  modified_base 35: mod_base = OTHER; note = 2'-O-methyl modified nucleotide
  modified_base 36: mod_base = OTHER; note = 2'-O-methyl modified nucleotide
  modified_base 37: mod_base = OTHER; note = 2'-O-methyl modified nucleotide
  modified_base 38: mod_base = OTHER; note = 2'-O-methyl modified nucleotide
  modified_base 39: mod_base = OTHER; note = 2'-O-methyl modified nucleotide
  modified_base 40: mod_base = OTHER; note = 2'-O-methyl modified nucleotide
  modified_base 69: mod_base = OTHER; note = 2'-O-methyl modified nucleotide
  modified_base 70: mod_base = OTHER; note = 2'-O-methyl modified nucleotide
  modified_base 71: mod_base = OTHER; note = 2'-O-methyl modified nucleotide
  modified_base 72: mod_base = OTHER; note = 2'-O-methyl modified nucleotide
  modified_base 73: mod_base = OTHER; note = 2'-O-methyl modified nucleotide
  modified_base 74: mod_base = OTHER; note = 2'-O-methyl modified nucleotide
  modified_base 75: mod_base = OTHER; note = 2'-O-methyl modified nucleotide
  modified_base 76: mod_base = OTHER; note = 2'-O-methyl modified nucleotide
  modified_base 77: mod_base = OTHER; note = 2'-O-methyl modified nucleotide
  modified_base 78: mod_base = OTHER; note = 2'-O-methyl modified nucleotide
  modified_base 79: mod_base = OTHER; note = 2'-O-methyl modified nucleotide
  modified_base 80: mod_base = OTHER; note = 2'-O-methyl modified nucleotide
  modified_base 81: mod_base = OTHER; note = 2'-O-methyl modified nucleotide
  modified_base 82: mod_base = OTHER; note = 2'-O-methyl modified nucleotide
  modified_base 83: mod_base = OTHER; note = 2'-O-methyl modified nucleotide
  modified_base 84: mod_base = OTHER; note = 2'-O-methyl modified nucleotide
  modified_base 85: mod_base = OTHER; note = 2'-O-methyl modified nucleotide
  modified_base 86: mod_base = OTHER; note = 2'-O-methyl modified nucleotide
  modified_base 87: mod_base = OTHER; note = 2'-O-methyl modified nucleotide
  modified_base 88: mod_base = OTHER; note = 2'-O-methyl modified nucleotide
  modified_base 89: mod_base = OTHER; note = 2'-O-methyl modified nucleotide
  modified_base 90: mod_base = OTHER; note = 2'-O-methyl modified nucleotide
  modified_base 91: mod_base = OTHER; note = 2'-O-methyl modified nucleotide
  modified_base 92: mod_base = OTHER; note = 2'-O-methyl modified nucleotide
  modified_base 93: mod_base = OTHER; note = 2'-O-methyl modified nucleotide
  modified_base 94: mod_base = OTHER; note = 2'-O-methyl modified nucleotide
  modified_base 95: mod_base = OTHER; note = 2'-O-methyl modified nucleotide
  modified_base 96: mod_base = OTHER; note = 2'-O-methyl modified nucleotide
  modified_base 110: mod_base = OTHER; note = Nucleotide with phosphorothioate linkage
  modified_base 111: mod_base = OTHER; note = 2'-O-methyl modified nucleotide with phosphorothioate linkage
  modified_base 112: mod_base = OTHER; note = 2'-O-methyl modified nucleotide with phosphorothioate linkage
  modified_base 113: mod_base = OTHER; note = 2'-O-methyl modified nucleotide
gctggtacacggcagggtcagttttagagctagaaatagcaagttaaaataaggctagtccgttatcaacttgaaaaagtggcaccgagtcggtgcagaacccctgccgtgta

SEQ ID NO: 16507 - RNA, 112 nt, synthetic construct
  source 1..112: mol_type = other RNA
  modified_base 1: mod_base = OTHER; note = 2'-O-methyl modified nucleotide with phosphorothioate linkage
  modified_base 2: mod_base = OTHER; note = 2'-O-methyl modified nucleotide with phosphorothioate linkage
  modified_base 3: mod_base = OTHER; note = 2'-O-methyl modified nucleotide with phosphorothioate linkage
  modified_base 29: mod_base = OTHER; note = 2'-O-methyl modified nucleotide
  modified_base 30: mod_base = OTHER; note = 2'-O-methyl modified nucleotide
  modified_base 31: mod_base = OTHER; note = 2'-O-methyl modified nucleotide
  modified_base 32: mod_base = OTHER; note = 2'-O-methyl modified nucleotide
  modified_base 33: mod_base = OTHER; note = 2'-O-methyl modified nucleotide
  modified_base 34: mod_base = OTHER; note = 2'-O-methyl modified nucleotide
  modified_base 35: mod_base = OTHER; note = 2'-O-methyl modified nucleotide
  modified_base 36: mod_base = OTHER; note = 2'-O-methyl modified nucleotide
  modified_base 37: mod_base = OTHER; note = 2'-O-methyl modified nucleotide
  modified_base 38: mod_base = OTHER; note = 2'-O-methyl modified nucleotide
  modified_base 39: mod_base = OTHER; note = 2'-O-methyl modified nucleotide
  modified_base 40: mod_base = OTHER; note = 2'-O-methyl modified nucleotide
  modified_base 69: mod_base = OTHER; note = 2'-O-methyl modified nucleotide
  modified_base 70: mod_base = OTHER; note = 2'-O-methyl modified nucleotide
  modified_base 71: mod_base = OTHER; note = 2'-O-methyl modified nucleotide
  modified_base 72: mod_base = OTHER; note = 2'-O-methyl modified nucleotide
  modified_base 73: mod_base = OTHER; note = 2'-O-methyl modified nucleotide
  modified_base 74: mod_base = OTHER; note = 2'-O-methyl modified nucleotide
  modified_base 75: mod_base = OTHER; note = 2'-O-methyl modified nucleotide
  modified_base 76: mod_base = OTHER; note = 2'-O-methyl modified nucleotide
  modified_base 77: mod_base = OTHER; note = 2'-O-methyl modified nucleotide
  modified_base 78: mod_base = OTHER; note = 2'-O-methyl modified nucleotide
  modified_base 79: mod_base = OTHER; note = 2'-O-methyl modified nucleotide
  modified_base 80: mod_base = OTHER; note = 2'-O-methyl modified nucleotide
  modified_base 81: mod_base = OTHER; note = 2'-O-methyl modified nucleotide
  modified_base 82: mod_base = OTHER; note = 2'-O-methyl modified nucleotide
  modified_base 83: mod_base = OTHER; note = 2'-O-methyl modified nucleotide
  modified_base 84: mod_base = OTHER; note = 2'-O-methyl modified nucleotide
  modified_base 85: mod_base = OTHER; note = 2'-O-methyl modified nucleotide
  modified_base 86: mod_base = OTHER; note = 2'-O-methyl modified nucleotide
  modified_base 87: mod_base = OTHER; note = 2'-O-methyl modified nucleotide
  modified_base 88: mod_base = OTHER; note = 2'-O-methyl modified nucleotide
  modified_base 89: mod_base = OTHER; note = 2'-O-methyl modified nucleotide
  modified_base 90: mod_base = OTHER; note = 2'-O-methyl modified nucleotide
  modified_base 91: mod_base = OTHER; note = 2'-O-methyl modified nucleotide
  modified_base 92: mod_base = OTHER; note = 2'-O-methyl modified nucleotide
  modified_base 93: mod_base = OTHER; note = 2'-O-methyl modified nucleotide
  modified_base 94: mod_base = OTHER; note = 2'-O-methyl modified nucleotide
  modified_base 95: mod_base = OTHER; note = 2'-O-methyl modified nucleotide
  modified_base 96: mod_base = OTHER; note = 2'-O-methyl modified nucleotide
  modified_base 109: mod_base = OTHER; note = Nucleotide with phosphorothioate linkage
  modified_base 110: mod_base = OTHER; note = 2'-O-methyl modified nucleotide with phosphorothioate linkage
  modified_base 111: mod_base = OTHER; note = 2'-O-methyl modified nucleotide with phosphorothioate linkage
  modified_base 112: mod_base = OTHER; note = 2'-O-methyl modified nucleotide
gctggtacacggcagggtcagttttagagctagaaatagcaagttaaaataaggctagtccgttatcaacttgaaaaagtggcaccgagtcggtgcagaacccctgccgtgt

SEQ ID NO: 16508 - RNA, 111 nt, synthetic construct
  source 1..111: mol_type = other RNA
  modified_base 1: mod_base = OTHER; note = 2'-O-methyl modified nucleotide with phosphorothioate linkage
  modified_base 2: mod_base = OTHER; note = 2'-O-methyl modified nucleotide with phosphorothioate linkage
  modified_base 3: mod_base = OTHER; note = 2'-O-methyl modified nucleotide with phosphorothioate linkage
  modified_base 29: mod_base = OTHER; note = 2'-O-methyl modified nucleotide
  modified_base 30: mod_base = OTHER; note = 2'-O-methyl modified nucleotide
  modified_base 31: mod_base = OTHER; note = 2'-O-methyl modified nucleotide
  modified_base 32: mod_base = OTHER; note = 2'-O-methyl modified nucleotide
  modified_base 33: mod_base = OTHER; note = 2'-O-methyl modified nucleotide
  modified_base 34: mod_base = OTHER; note = 2'-O-methyl modified nucleotide
  modified_base 35: mod_base = OTHER; note = 2'-O-methyl modified nucleotide
  modified_base 36: mod_base = OTHER; note = 2'-O-methyl modified nucleotide
  modified_base 37: mod_base = OTHER; note = 2'-O-methyl modified nucleotide
  modified_base 38: mod_base = OTHER; note = 2'-O-methyl modified nucleotide
  modified_base 39: mod_base = OTHER; note = 2'-O-methyl modified nucleotide
  modified_base 40: mod_base = OTHER; note = 2'-O-methyl modified nucleotide
  modified_base 69: mod_base = OTHER; note = 2'-O-methyl modified nucleotide
  modified_base 70: mod_base = OTHER; note = 2'-O-methyl modified nucleotide
  modified_base 71: mod_base = OTHER; note = 2'-O-methyl modified nucleotide
  modified_base 72: mod_base = OTHER; note = 2'-O-methyl modified nucleotide
  modified_base 73: mod_base = OTHER; note = 2'-O-methyl modified nucleotide
  modified_base 74: mod_base = OTHER; note = 2'-O-methyl modified nucleotide
  modified_base 75: mod_base = OTHER; note = 2'-O-methyl modified nucleotide
  modified_base 76: mod_base = OTHER; note = 2'-O-methyl modified nucleotide
  modified_base 77: mod_base = OTHER; note = 2'-O-methyl modified nucleotide
  modified_base 78: mod_base = OTHER; note = 2'-O-methyl modified nucleotide
  modified_base 79: mod_base = OTHER; note = 2'-O-methyl modified nucleotide
  modified_base 80: mod_base = OTHER; note = 2'-O-methyl modified nucleotide
  modified_base 81: mod_base = OTHER; note = 2'-O-methyl modified nucleotide
  modified_base 82: mod_base = OTHER; note = 2'-O-methyl modified nucleotide
  modified_base 83: mod_base = OTHER; note = 2'-O-methyl modified nucleotide
  modified_base 84: mod_base = OTHER; note = 2'-O-methyl modified nucleotide
  modified_base 85: mod_base = OTHER; note = 2'-O-methyl modified nucleotide
  modified_base 86: mod_base = OTHER; note = 2'-O-methyl modified nucleotide
  modified_base 87: mod_base = OTHER; note = 2'-O-methyl modified nucleotide
  modified_base 88: mod_base = OTHER; note = 2'-O-methyl modified nucleotide
  modified_base 89: mod_base = OTHER; note = 2'-O-methyl modified nucleotide
  modified_base 90: mod_base = OTHER; note = 2'-O-methyl modified nucleotide
  modified_base 91: mod_base = OTHER; note = 2'-O-methyl modified nucleotide
  modified_base 92: mod_base = OTHER; note = 2'-O-methyl modified nucleotide
  modified_base 93: mod_base = OTHER; note = 2'-O-methyl modified nucleotide
  modified_base 94: mod_base = OTHER; note = 2'-O-methyl modified nucleotide
  modified_base 95: mod_base = OTHER; note = 2'-O-methyl modified nucleotide
  modified_base 96: mod_base = OTHER; note = 2'-O-methyl modified nucleotide
  modified_base 108: mod_base = OTHER; note = Nucleotide with phosphorothioate linkage
  modified_base 109: mod_base = OTHER; note = 2'-O-methyl modified nucleotide with phosphorothioate linkage
  modified_base 110: mod_base = OTHER; note = 2'-O-methyl modified nucleotide with phosphorothioate linkage
  modified_base 111: mod_base = OTHER; note = 2'-O-methyl modified nucleotide
gctggtacacggcagggtcagttttagagctagaaatagcaagttaaaataaggctagtccgttatcaacttgaaaaagtggcaccgagtcggtgcagaacccctgccgtg

SEQ ID NO: 16509 - RNA, 110 nt, synthetic construct
  source 1..110: mol_type = other RNA
  modified_base 1: mod_base = OTHER; note = 2'-O-methyl modified nucleotide with phosphorothioate linkage
  modified_base 2: mod_base = OTHER; note = 2'-O-methyl modified nucleotide with phosphorothioate linkage
  modified_base 3: mod_base = OTHER; note = 2'-O-methyl modified nucleotide with phosphorothioate linkage
  modified_base 29: mod_base = OTHER; note = 2'-O-methyl modified nucleotide
  modified_base 30: mod_base = OTHER; note = 2'-O-methyl modified nucleotide
  modified_base 31: mod_base = OTHER; note = 2'-O-methyl modified nucleotide
  modified_base 32: mod_base = OTHER; note = 2'-O-methyl modified nucleotide
  modified_base 33: mod_base = OTHER; note = 2'-O-methyl modified nucleotide
  modified_base 34: mod_base = OTHER; note = 2'-O-methyl modified nucleotide
  modified_base 35: mod_base = OTHER; note = 2'-O-methyl modified nucleotide
  modified_base 36: mod_base = OTHER; note = 2'-O-methyl modified nucleotide
  modified_base 37: mod_base = OTHER; note = 2'-O-methyl modified nucleotide
  modified_base 38: mod_base = OTHER; note = 2'-O-methyl modified nucleotide
  modified_base 39: mod_base = OTHER; note = 2'-O-methyl modified nucleotide
  modified_base 40: mod_base = OTHER; note = 2'-O-methyl modified nucleotide
  modified_base 69: mod_base = OTHER; note = 2'-O-methyl modified nucleotide
  modified_base 70: mod_base = OTHER; note = 2'-O-methyl modified nucleotide
  modified_base 71: mod_base = OTHER; note = 2'-O-methyl modified nucleotide
  modified_base 72: mod_base = OTHER; note = 2'-O-methyl modified nucleotide
  modified_base 73: mod_base = OTHER; note = 2'-O-methyl modified nucleotide
  modified_base 74: mod_base = OTHER; note = 2'-O-methyl modified nucleotide
  modified_base 75: mod_base = OTHER; note = 2'-O-methyl modified nucleotide
  modified_base 76: mod_base = OTHER; note = 2'-O-methyl modified nucleotide
  modified_base 77: mod_base = OTHER; note = 2'-O-methyl modified nucleotide
  modified_base 78: mod_base = OTHER; note = 2'-O-methyl modified nucleotide
  modified_base 79: mod_base = OTHER; note = 2'-O-methyl modified nucleotide
  modified_base 80: mod_base = OTHER; note = 2'-O-methyl modified nucleotide
  modified_base 81: mod_base = OTHER; note = 2'-O-methyl modified nucleotide
  modified_base 82: mod_base = OTHER; note = 2'-O-methyl modified nucleotide
  modified_base 83: mod_base = OTHER; note = 2'-O-methyl modified nucleotide
  modified_base 84: mod_base = OTHER; note = 2'-O-methyl modified nucleotide
  modified_base 85: mod_base = OTHER; note = 2'-O-methyl modified nucleotide
  modified_base 86: mod_base = OTHER; note = 2'-O-methyl modified nucleotide
  modified_base 87: mod_base = OTHER; note = 2'-O-methyl modified nucleotide
  modified_base 88: mod_base = OTHER; note = 2'-O-methyl modified nucleotide
  modified_base 89: mod_base = OTHER; note = 2'-O-methyl modified nucleotide
  modified_base 90: mod_base = OTHER; note = 2'-O-methyl modified nucleotide
  modified_base 91: mod_base = OTHER; note = 2'-O-methyl modified nucleotide
  modified_base 92: mod_base = OTHER; note = 2'-O-methyl modified nucleotide
  modified_base 93: mod_base = OTHER; note = 2'-O-methyl modified nucleotide
  modified_base 94: mod_base = OTHER; note = 2'-O-methyl modified nucleotide
  modified_base 95: mod_base = OTHER; note = 2'-O-methyl modified nucleotide
  modified_base 96: mod_base = OTHER; note = 2'-O-methyl modified nucleotide
  modified_base 107: mod_base = OTHER; note = Nucleotide with phosphorothioate linkage
  modified_base 108: mod_base = OTHER; note = 2'-O-methyl modified nucleotide with phosphorothioate linkage
  modified_base 109: mod_base = OTHER; note = 2'-O-methyl modified nucleotide with phosphorothioate linkage
  modified_base 110: mod_base = OTHER; note = 2'-O-methyl modified nucleotide
gctggtacacggcagggtcagttttagagctagaaatagcaagttaaaataaggctagtccgttatcaacttgaaaaagtggcaccgagtcggtgcagaacccctgccgt

SEQ ID NO: 16510 - RNA, 109 nt, synthetic construct
  source 1..109: mol_type = other RNA
  modified_base 1: mod_base = OTHER; note = 2'-O-methyl modified nucleotide with phosphorothioate linkage
  modified_base 2: mod_base = OTHER; note = 2'-O-methyl modified nucleotide with phosphorothioate linkage
  modified_base 3: mod_base = OTHER; note = 2'-O-methyl modified nucleotide with phosphorothioate linkage
  modified_base 29: mod_base = OTHER; note = 2'-O-methyl modified nucleotide
  modified_base 30: mod_base = OTHER; note = 2'-O-methyl modified nucleotide
  modified_base 31: mod_base = OTHER; note = 2'-O-methyl modified nucleotide
  modified_base 32: mod_base = OTHER; note = 2'-O-methyl modified nucleotide
  modified_base 33: mod_base = OTHER; note = 2'-O-methyl modified nucleotide
  modified_base 34: mod_base = OTHER; note = 2'-O-methyl modified nucleotide
  modified_base 35: mod_base = OTHER; note = 2'-O-methyl modified nucleotide
  modified_base 36: mod_base = OTHER; note = 2'-O-methyl modified nucleotide
  modified_base 37: mod_base = OTHER; note = 2'-O-methyl modified nucleotide
  modified_base 38: mod_base = OTHER; note = 2'-O-methyl modified nucleotide
  modified_base 39: mod_base = OTHER; note = 2'-O-methyl modified nucleotide
  modified_base 40: mod_base = OTHER; note = 2'-O-methyl modified nucleotide
  modified_base 69: mod_base = OTHER; note = 2'-O-methyl modified nucleotide
  modified_base 70: mod_base = OTHER; note = 2'-O-methyl modified nucleotide
  modified_base 71: mod_base = OTHER; note = 2'-O-methyl modified nucleotide
  modified_base 72: mod_base = OTHER; note = 2'-O-methyl modified nucleotide
  modified_base 73: mod_base = OTHER; note = 2'-O-methyl modified nucleotide
  modified_base 74: mod_base = OTHER; note = 2'-O-methyl modified nucleotide
  modified_base 75: mod_base = OTHER; note = 2'-O-methyl modified nucleotide
  modified_base 76: mod_base = OTHER; note = 2'-O-methyl modified nucleotide
  modified_base 77: mod_base = OTHER; note = 2'-O-methyl modified nucleotide
  modified_base 78: mod_base = OTHER; note = 2'-O-methyl modified nucleotide
  modified_base 79: mod_base = OTHER; note = 2'-O-methyl modified nucleotide
  modified_base 80: mod_base = OTHER; note = 2'-O-methyl modified nucleotide
  modified_base 81: mod_base = OTHER; note = 2'-O-methyl modified nucleotide
  modified_base 82: mod_base = OTHER; note = 2'-O-methyl modified nucleotide
  modified_base 83: mod_base = OTHER; note = 2'-O-methyl modified nucleotide
  modified_base 84: mod_base = OTHER; note = 2'-O-methyl modified nucleotide
  modified_base 85: mod_base = OTHER; note = 2'-O-methyl modified nucleotide
  modified_base 86: mod_base = OTHER; note = 2'-O-methyl modified nucleotide
  modified_base 87: mod_base = OTHER; note = 2'-O-methyl modified nucleotide
  modified_base 88: mod_base = OTHER; note = 2'-O-methyl modified nucleotide
  modified_base 89: mod_base = OTHER; note = 2'-O-methyl modified nucleotide
  modified_base 90: mod_base = OTHER; note = 2'-O-methyl modified nucleotide
  modified_base 91: mod_base = OTHER; note = 2'-O-methyl modified nucleotide
  modified_base 92: mod_base = OTHER; note = 2'-O-methyl modified nucleotide
  modified_base 93: mod_base = OTHER; note = 2'-O-methyl modified nucleotide
  modified_base 94: mod_base = OTHER; note = 2'-O-methyl modified nucleotide
  modified_base 95: mod_base = OTHER; note = 2'-O-methyl modified nucleotide
  modified_base 96: mod_base = OTHER; note = 2'-O-methyl modified nucleotide
  modified_base 106: mod_base = OTHER; note = Nucleotide with phosphorothioate linkage
  modified_base 107: mod_base = OTHER; note = 2'-O-methyl modified nucleotide with phosphorothioate linkage
  modified_base 108: mod_base = OTHER; note = 2'-O-methyl modified nucleotide with phosphorothioate linkage
  modified_base 109: mod_base = OTHER; note = 2'-O-methyl modified nucleotide
gctggtacacggcagggtcagttttagagctagaaatagcaagttaaaataaggctagtccgttatcaacttgaaaaagtggcaccgagtcggtgcagaacccctgccg

SEQ ID NO: 16511 - RNA, 116 nt, synthetic construct
  source 1..116: mol_type = other RNA
  modified_base 1: mod_base = OTHER; note = 2'-O-methyl modified nucleotide with phosphorothioate linkage
  modified_base 2: mod_base = OTHER; note = 2'-O-methyl modified nucleotide with phosphorothioate linkage
  modified_base 3: mod_base = OTHER; note = 2'-O-methyl modified nucleotide with phosphorothioate linkage
  modified_base 29: mod_base = OTHER; note = 2'-O-methyl modified nucleotide
  modified_base 30: mod_base = OTHER; note = 2'-O-methyl modified nucleotide
  modified_base 31: mod_base = OTHER; note = 2'-O-methyl modified nucleotide
  modified_base 32: mod_base = OTHER; note = 2'-O-methyl modified nucleotide
  modified_base 33: mod_base = OTHER; note = 2'-O-methyl modified nucleotide
  modified_base 34: mod_base = OTHER; note = 2'-O-methyl modified nucleotide
  modified_base 35: mod_base = OTHER; note = 2'-O-methyl modified nucleotide
  modified_base 36: mod_base = OTHER; note = 2'-O-methyl modified nucleotide
  modified_base 37: mod_base = OTHER; note = 2'-O-methyl modified nucleotide
  modified_base 38: mod_base = OTHER; note = 2'-O-methyl modified nucleotide
  modified_base 39: mod_base = OTHER; note = 2'-O-methyl modified nucleotide
  modified_base 40: mod_base = OTHER; note = 2'-O-methyl modified nucleotide
  modified_base 69: mod_base = OTHER; note = 2'-O-methyl modified nucleotide
  modified_base 70: mod_base = OTHER; note = 2'-O-methyl modified nucleotide
  modified_base 71: mod_base = OTHER; note = 2'-O-methyl modified nucleotide
  modified_base 72: mod_base = OTHER; note = 2'-O-methyl modified nucleotide
  modified_base 73: mod_base = OTHER; note = 2'-O-methyl modified nucleotide
  modified_base 74: mod_base = OTHER; note = 2'-O-methyl modified nucleotide
  modified_base 75: mod_base = OTHER; note = 2'-O-methyl modified nucleotide
  modified_base 76: mod_base = OTHER; note = 2'-O-methyl modified nucleotide
  modified_base 77: mod_base = OTHER; note = 2'-O-methyl modified nucleotide
  modified_base 78: mod_base = OTHER; note = 2'-O-methyl modified nucleotide
  modified_base 79: mod_base = OTHER; note = 2'-O-methyl modified nucleotide
  modified_base 80: mod_base = OTHER; note = 2'-O-methyl modified nucleotide
  modified_base 81: mod_base = OTHER; note = 2'-O-methyl modified nucleotide
  modified_base 82: mod_base = OTHER; note = 2'-O-methyl modified nucleotide
  modified_base 83: mod_base = OTHER; note = 2'-O-methyl modified nucleotide
  modified_base 84: mod_base = OTHER; note = 2'-O-methyl modified nucleotide
  modified_base 85: mod_base = OTHER; note = 2'-O-methyl modified nucleotide
  modified_base 86: mod_base = OTHER; note = 2'-O-methyl modified nucleotide
  modified_base 87: mod_base = OTHER; note = 2'-O-methyl modified nucleotide
  modified_base 88: mod_base = OTHER; note = 2'-O-methyl modified nucleotide
  modified_base 89: mod_base = OTHER; note = 2'-O-methyl modified nucleotide
  modified_base 90: mod_base = OTHER; note = 2'-O-methyl modified nucleotide
  modified_base 91: mod_base = OTHER; note = 2'-O-methyl modified nucleotide
  modified_base 92: mod_base = OTHER; note = 2'-O-methyl modified nucleotide
  modified_base 93: mod_base = OTHER; note = 2'-O-methyl modified nucleotide
  modified_base 94: mod_base = OTHER; note = 2'-O-methyl modified nucleotide
  modified_base 95: mod_base = OTHER; note = 2'-O-methyl modified nucleotide
  modified_base 96: mod_base = OTHER; note = 2'-O-methyl modified nucleotide
  modified_base 113: mod_base = OTHER; note = Nucleotide with phosphorothioate linkage
  modified_base 114: mod_base = OTHER; note = 2'-O-methyl modified nucleotide with phosphorothioate linkage
  modified_base 115: mod_base = OTHER; note = 2'-O-methyl modified nucleotide with phosphorothioate linkage
  modified_base 116: mod_base = OTHER; note = 2'-O-methyl modified nucleotide
gctggtacacggcagggtcagttttagagctagaaatagcaagttaaaataaggctagtccgttatcaacttgaaaaagtggcaccgagtcggtgcccagaacccctgccgtgtac

SEQ ID NO: 16512 - RNA, 115 nt, synthetic construct
  source 1..115: mol_type = other RNA
  modified_base 1: mod_base = OTHER; note = 2'-O-methyl modified nucleotide with phosphorothioate linkage
  modified_base 2: mod_base = OTHER; note = 2'-O-methyl modified nucleotide with phosphorothioate linkage
  modified_base 3: mod_base = OTHER; note = 2'-O-methyl modified nucleotide with phosphorothioate linkage
  modified_base 29: mod_base = OTHER; note = 2'-O-methyl modified nucleotide
  modified_base 30: mod_base = OTHER; note = 2'-O-methyl modified nucleotide
  modified_base 31: mod_base = OTHER; note = 2'-O-methyl modified nucleotide
  modified_base 32: mod_base = OTHER; note = 2'-O-methyl modified nucleotide
  modified_base 33: mod_base = OTHER; note = 2'-O-methyl modified nucleotide
  modified_base 34: mod_base = OTHER; note = 2'-O-methyl modified nucleotide
  modified_base 35: mod_base = OTHER; note = 2'-O-methyl modified nucleotide
  modified_base 36: mod_base = OTHER; note = 2'-O-methyl modified nucleotide
  modified_base 37: mod_base = OTHER; note = 2'-O-methyl modified nucleotide
  modified_base 38: mod_base = OTHER; note = 2'-O-methyl modified nucleotide
  modified_base 39: mod_base = OTHER; note = 2'-O-methyl modified nucleotide
  modified_base 40: mod_base = OTHER; note = 2'-O-methyl modified nucleotide
  modified_base 69: mod_base = OTHER; note = 2'-O-methyl modified nucleotide
  modified_base 70: mod_base = OTHER; note = 2'-O-methyl modified nucleotide
  modified_base 71: mod_base = OTHER; note = 2'-O-methyl modified nucleotide
  modified_base 72: mod_base = OTHER; note = 2'-O-methyl modified nucleotide
  modified_base 73: mod_base = OTHER; note = 2'-O-methyl modified nucleotide
  modified_base 74: mod_base = OTHER; note = 2'-O-methyl modified nucleotide
  modified_base 75: mod_base = OTHER; note = 2'-O-methyl modified nucleotide
  modified_base 76: mod_base = OTHER; note = 2'-O-methyl modified nucleotide
  modified_base 77: mod_base = OTHER; note = 2'-O-methyl modified nucleotide
  modified_base 78: mod_base = OTHER; note = 2'-O-methyl modified nucleotide
  modified_base 79: mod_base = OTHER; note = 2'-O-methyl modified nucleotide
  modified_base 80: mod_base = OTHER; note = 2'-O-methyl modified nucleotide
  modified_base 81: mod_base = OTHER; note = 2'-O-methyl modified nucleotide
  modified_base 82: mod_base = OTHER; note = 2'-O-methyl modified nucleotide
  modified_base 83: mod_base = OTHER; note = 2'-O-methyl modified nucleotide
  modified_base 84: mod_base = OTHER; note = 2'-O-methyl modified nucleotide
  modified_base 85: mod_base = OTHER; note = 2'-O-methyl modified nucleotide
  modified_base 86: mod_base = OTHER; note = 2'-O-methyl modified nucleotide
  modified_base 87: mod_base = OTHER; note = 2'-O-methyl modified nucleotide
  modified_base 88: mod_base = OTHER; note = 2'-O-methyl modified nucleotide
  modified_base 89: mod_base = OTHER; note = 2'-O-methyl modified nucleotide
  modified_base 90: mod_base = OTHER; note = 2'-O-methyl modified nucleotide
  modified_base 91: mod_base = OTHER; note = 2'-O-methyl modified nucleotide
  modified_base 92: mod_base = OTHER; note = 2'-O-methyl modified nucleotide
  modified_base 93: mod_base = OTHER; note = 2'-O-methyl modified nucleotide
  modified_base 94: mod_base = OTHER; note = 2'-O-methyl modified nucleotide
  modified_base 95: mod_base = OTHER; note = 2'-O-methyl modified nucleotide
  modified_base 96: mod_base = OTHER; note = 2'-O-methyl modified nucleotide
  modified_base 112: mod_base = OTHER; note = Nucleotide with phosphorothioate linkage
  modified_base 113: mod_base = OTHER; note = 2'-O-methyl modified nucleotide with phosphorothioate linkage
  modified_base 114: mod_base = OTHER; note = 2'-O-methyl modified nucleotide with phosphorothioate linkage
  modified_base 115: mod_base = OTHER; note = 2'-O-methyl modified nucleotide
gctggtacacggcagggtcagttttagagctagaaatagcaagttaaaataaggctagtccgttatcaacttgaaaaagtggcaccgagtcggtgcccagaacccctgccgtgta

SEQ ID NO: 16513 - RNA, 114 nt, synthetic construct
  source 1..114: mol_type = other RNA
  modified_base 1: mod_base = OTHER; note = 2'-O-methyl modified nucleotide with phosphorothioate linkage
  modified_base 2: mod_base = OTHER; note = 2'-O-methyl modified nucleotide with phosphorothioate linkage
  modified_base 3: mod_base = OTHER; note = 2'-O-methyl modified nucleotide with phosphorothioate linkage
  modified_base 29: mod_base = OTHER; note = 2'-O-methyl modified nucleotide
  modified_base 30: mod_base = OTHER; note = 2'-O-methyl modified nucleotide
  modified_base 31: mod_base = OTHER; note = 2'-O-methyl modified nucleotide
  modified_base 32: mod_base = OTHER; note = 2'-O-methyl modified nucleotide
  modified_base 33: mod_base = OTHER; note = 2'-O-methyl modified nucleotide
  modified_base 34: mod_base = OTHER; note = 2'-O-methyl modified nucleotide
  modified_base 35: mod_base = OTHER; note = 2'-O-methyl modified nucleotide
  modified_base 36: mod_base = OTHER; note = 2'-O-methyl modified nucleotide
  modified_base 37: mod_base = OTHER; note = 2'-O-methyl modified nucleotide
  modified_base 38: mod_base = OTHER; note = 2'-O-methyl modified nucleotide
  modified_base 39: mod_base = OTHER; note = 2'-O-methyl modified nucleotide
  modified_base 40: mod_base = OTHER; note = 2'-O-methyl modified nucleotide
  modified_base 69: mod_base = OTHER; note = 2'-O-methyl modified nucleotide
  modified_base 70: mod_base = OTHER; note = 2'-O-methyl modified nucleotide
  modified_base 71: mod_base = OTHER; note = 2'-O-methyl modified nucleotide
  modified_base 72: mod_base = OTHER; note = 2'-O-methyl modified nucleotide
  modified_base 73: mod_base = OTHER; note = 2'-O-methyl modified nucleotide
  modified_base 74: mod_base = OTHER; note = 2'-O-methyl modified nucleotide
  modified_base 75: mod_base = OTHER; note = 2'-O-methyl modified nucleotide
  modified_base 76: mod_base = OTHER; note = 2'-O-methyl modified nucleotide
  modified_base 77: mod_base = OTHER; note = 2'-O-methyl modified nucleotide
  modified_base 78: mod_base = OTHER; note = 2'-O-methyl modified nucleotide
  modified_base 79: mod_base = OTHER; note = 2'-O-methyl modified nucleotide
  modified_base 80: mod_base = OTHER; note = 2'-O-methyl modified nucleotide
  modified_base 81: mod_base = OTHER; note = 2'-O-methyl modified nucleotide
  modified_base 82: mod_base = OTHER; note = 2'-O-methyl modified nucleotide
  modified_base 83: mod_base = OTHER; note = 2'-O-methyl modified nucleotide
  modified_base 84: mod_base = OTHER; note = 2'-O-methyl modified nucleotide
  modified_base 85: mod_base = OTHER; note = 2'-O-methyl modified nucleotide
  modified_base 86: mod_base = OTHER; note = 2'-O-methyl modified nucleotide
  modified_base 87: mod_base = OTHER; note = 2'-O-methyl modified nucleotide
  modified_base 88: mod_base = OTHER; note = 2'-O-methyl modified nucleotide
  modified_base 89: mod_base = OTHER; note = 2'-O-methyl modified nucleotide
  modified_base 90: mod_base = OTHER; note = 2'-O-methyl modified nucleotide
  modified_base 91: mod_base = OTHER; note = 2'-O-methyl modified nucleotide
  modified_base 92: mod_base = OTHER; note = 2'-O-methyl modified nucleotide
  modified_base 93: mod_base = OTHER; note = 2'-O-methyl modified nucleotide
  modified_base 94: mod_base = OTHER; note = 2'-O-methyl modified nucleotide
  modified_base 95: mod_base = OTHER; note = 2'-O-methyl modified nucleotide
  modified_base 96: mod_base = OTHER; note = 2'-O-methyl modified nucleotide
  modified_base 111: mod_base = OTHER; note = Nucleotide with phosphorothioate linkage
  modified_base 112: mod_base = OTHER; note = 2'-O-methyl modified nucleotide with phosphorothioate linkage
  modified_base 113: mod_base = OTHER; note = 2'-O-methyl modified nucleotide with phosphorothioate linkage
  modified_base 114: mod_base = OTHER; note = 2'-O-methyl modified nucleotide
gctggtacacggcagggtcagttttagagctagaaatagcaagttaaaataaggctagtccgttatcaacttgaaaaagtggcaccgagtcggtgcccagaacccctgccgtgt

SEQ ID NO: 16514 - RNA, 113 nt, synthetic construct
  source 1..113: mol_type = other RNA
  modified_base 1: mod_base = OTHER; note = 2'-O-methyl modified nucleotide with phosphorothioate linkage
  modified_base 2: mod_base = OTHER; note = 2'-O-methyl modified nucleotide with phosphorothioate linkage
  modified_base 3: mod_base = OTHER; note = 2'-O-methyl modified nucleotide with phosphorothioate linkage
  modified_base 29: mod_base = OTHER; note = 2'-O-methyl modified nucleotide
  modified_base 30: mod_base = OTHER; note = 2'-O-methyl modified nucleotide
  modified_base 31: mod_base = OTHER; note = 2'-O-methyl modified nucleotide
  modified_base 32: mod_base = OTHER; note = 2'-O-methyl modified nucleotide
  modified_base 33: mod_base = OTHER; note = 2'-O-methyl modified nucleotide
  modified_base 34: mod_base = OTHER; note = 2'-O-methyl modified nucleotide
  modified_base 35: mod_base = OTHER; note = 2'-O-methyl modified nucleotide
  modified_base 36: mod_base = OTHER; note = 2'-O-methyl modified nucleotide
  modified_base 37: mod_base = OTHER; note = 2'-O-methyl modified nucleotide
  modified_base 38: mod_base = OTHER; note = 2'-O-methyl modified nucleotide
  modified_base 39: mod_base = OTHER; note = 2'-O-methyl modified nucleotide
  modified_base 40: mod_base = OTHER; note = 2'-O-methyl modified nucleotide
  modified_base 69: mod_base = OTHER; note = 2'-O-methyl modified nucleotide
  modified_base 70: mod_base = OTHER; note = 2'-O-methyl modified nucleotide
  modified_base 71: mod_base = OTHER; note = 2'-O-methyl modified nucleotide
  modified_base 72: mod_base = OTHER; note = 2'-O-methyl modified nucleotide
  modified_base 73: mod_base = OTHER; note = 2'-O-methyl modified nucleotide
  modified_base 74: mod_base = OTHER; note = 2'-O-methyl modified nucleotide
  modified_base 75: mod_base = OTHER; note = 2'-O-methyl modified nucleotide
  modified_base 76: mod_base = OTHER; note = 2'-O-methyl modified nucleotide
  modified_base 77: mod_base = OTHER; note = 2'-O-methyl modified nucleotide
  modified_base 78: mod_base = OTHER; note = 2'-O-methyl modified nucleotide
  modified_base 79: mod_base = OTHER; note = 2'-O-methyl modified nucleotide
  modified_base 80: mod_base = OTHER; note = 2'-O-methyl modified nucleotide
  modified_base 81: mod_base = OTHER; note = 2'-O-methyl modified nucleotide
  modified_base 82: mod_base = OTHER; note = 2'-O-methyl modified nucleotide
  modified_base 83: mod_base = OTHER; note = 2'-O-methyl modified nucleotide
  modified_base 84: mod_base = OTHER; note = 2'-O-methyl modified nucleotide
  modified_base 85: mod_base = OTHER; note = 2'-O-methyl modified nucleotide
  modified_base 86: mod_base = OTHER; note = 2'-O-methyl modified nucleotide
  modified_base 87: mod_base = OTHER; note = 2'-O-methyl modified nucleotide
  modified_base 88: mod_base = OTHER; note = 2'-O-methyl modified nucleotide
  modified_base 89: mod_base = OTHER; note = 2'-O-methyl modified nucleotide
  modified_base 90: mod_base = OTHER; note = 2'-O-methyl modified nucleotide
  modified_base 91: mod_base = OTHER; note = 2'-O-methyl modified nucleotide
  modified_base 92: mod_base = OTHER; note = 2'-O-methyl modified nucleotide
  modified_base 93: mod_base = OTHER; note = 2'-O-methyl modified nucleotide
  modified_base 94: mod_base = OTHER; note = 2'-O-methyl modified nucleotide
  modified_base 95: mod_base = OTHER; note = 2'-O-methyl modified nucleotide
  modified_base 96: mod_base = OTHER; note = 2'-O-methyl modified nucleotide
  modified_base 110: mod_base = OTHER; note = Nucleotide with phosphorothioate linkage
  modified_base 111: mod_base = OTHER; note = 2'-O-methyl modified nucleotide with phosphorothioate linkage
  modified_base 112: mod_base = OTHER; note = 2'-O-methyl modified nucleotide with phosphorothioate linkage
  modified_base 113: mod_base = OTHER; note = 2'-O-methyl modified nucleotide
gctggtacacggcagggtcagttttagagctagaaatagcaagttaaaataaggctagtccgttatcaacttgaaaaagtggcaccgagtcggtgcccagaacccctgccgtg

SEQ ID NO: 16515 - RNA, 112 nt, synthetic construct
  source 1..112: mol_type = other RNA
  modified_base 1: mod_base = OTHER; note = 2'-O-methyl modified nucleotide with phosphorothioate linkage
  modified_base 2: mod_base = OTHER; note = 2'-O-methyl modified nucleotide with phosphorothioate linkage
  modified_base 3: mod_base = OTHER; note = 2'-O-methyl modified nucleotide with phosphorothioate linkage
  modified_base 29: mod_base = OTHER; note = 2'-O-methyl modified nucleotide
  modified_base 30: mod_base = OTHER; note = 2'-O-methyl modified nucleotide
  modified_base 31: mod_base = OTHER; note = 2'-O-methyl modified nucleotide
  modified_base 32: mod_base = OTHER; note = 2'-O-methyl modified nucleotide
  modified_base 33: mod_base = OTHER; note = 2'-O-methyl modified nucleotide
  modified_base 34: mod_base = OTHER; note = 2'-O-methyl modified nucleotide
  modified_base 35: mod_base = OTHER; note = 2'-O-methyl modified nucleotide
  modified_base 36: mod_base = OTHER; note = 2'-O-methyl modified nucleotide
  modified_base 37: mod_base = OTHER; note = 2'-O-methyl modified nucleotide
  modified_base 38: mod_base = OTHER; note = 2'-O-methyl modified nucleotide
  modified_base 39: mod_base = OTHER; note = 2'-O-methyl modified nucleotide
  modified_base 40: mod_base = OTHER; note = 2'-O-methyl modified nucleotide
  modified_base 69: mod_base = OTHER; note = 2'-O-methyl modified nucleotide
  modified_base 70: mod_base = OTHER; note = 2'-O-methyl modified nucleotide
  modified_base 71: mod_base = OTHER; note = 2'-O-methyl modified nucleotide
  modified_base 72: mod_base = OTHER; note = 2'-O-methyl modified nucleotide
  modified_base 73: mod_base = OTHER; note = 2'-O-methyl modified nucleotide
  modified_base 74: mod_base = OTHER; note = 2'-O-methyl modified nucleotide
  modified_base 75: mod_base = OTHER; note = 2'-O-methyl modified nucleotide
  modified_base 76: mod_base = OTHER; note = 2'-O-methyl modified nucleotide
  modified_base 77: mod_base = OTHER; note = 2'-O-methyl modified nucleotide
  modified_base 78: mod_base = OTHER; note = 2'-O-methyl modified nucleotide
  modified_base 79: mod_base = OTHER; note = 2'-O-methyl modified nucleotide
  modified_base 80: mod_base = OTHER; note = 2'-O-methyl modified nucleotide
  modified_base 81: mod_base = OTHER; note = 2'-O-methyl modified nucleotide
  modified_base 82: mod_base = OTHER; note = 2'-O-methyl modified nucleotide
  modified_base 83: mod_base = OTHER; note = 2'-O-methyl modified nucleotide
  modified_base 84: mod_base = OTHER; note = 2'-O-methyl modified nucleotide
  modified_base 85: mod_base = OTHER; note = 2'-O-methyl modified nucleotide
  modified_base 86: mod_base = OTHER; note = 2'-O-methyl modified nucleotide
  modified_base 87: mod_base = OTHER; note = 2'-O-methyl modified nucleotide
  modified_base 88: mod_base = OTHER; note = 2'-O-methyl modified nucleotide
  modified_base 89: mod_base = OTHER; note = 2'-O-methyl modified nucleotide
  modified_base 90: mod_base = OTHER; note = 2'-O-methyl modified nucleotide
  modified_base 91: mod_base = OTHER; note = 2'-O-methyl modified nucleotide
  modified_base 92: mod_base = OTHER; note = 2'-O-methyl modified nucleotide
  modified_base 93: mod_base = OTHER; note = 2'-O-methyl modified nucleotide
  modified_base 94: mod_base = OTHER; note = 2'-O-methyl modified nucleotide
  modified_base 95: mod_base = OTHER; note = 2'-O-methyl modified nucleotide
  modified_base 96: mod_base = OTHER; note = 2'-O-methyl modified nucleotide
  modified_base 109: mod_base = OTHER; note = Nucleotide with phosphorothioate linkage
  modified_base 110: mod_base = OTHER; note = 2'-O-methyl modified nucleotide with phosphorothioate linkage
  modified_base 111: mod_base = OTHER; note = 2'-O-methyl modified nucleotide with phosphorothioate linkage
  modified_base 112: mod_base = OTHER; note = 2'-O-methyl modified nucleotide
gctggtacacggcagggtcagttttagagctagaaatagcaagttaaaataaggctagtccgttatcaacttgaaaaagtggcaccgagtcggtgcccagaacccctgccgt

SEQ ID NO: 16516 - RNA, 111 nt, synthetic construct
  source 1..111: mol_type = other RNA
  modified_base 1: mod_base = OTHER; note = 2'-O-methyl modified nucleotide with phosphorothioate linkage
  modified_base 2: mod_base = OTHER; note = 2'-O-methyl modified nucleotide with phosphorothioate linkage
  modified_base 3: mod_base = OTHER; note = 2'-O-methyl modified nucleotide with phosphorothioate linkage
  modified_base 29: mod_base = OTHER; note = 2'-O-methyl modified nucleotide
  modified_base 30: mod_base = OTHER; note = 2'-O-methyl modified nucleotide
  modified_base 31: mod_base = OTHER; note = 2'-O-methyl modified nucleotide
  modified_base 32: mod_base = OTHER; note = 2'-O-methyl modified nucleotide
  modified_base 33: mod_base = OTHER; note = 2'-O-methyl modified nucleotide
  modified_base 34: mod_base = OTHER; note = 2'-O-methyl modified nucleotide
  modified_base 35: mod_base = OTHER; note = 2'-O-methyl modified nucleotide
  modified_base 36: mod_base = OTHER; note = 2'-O-methyl modified nucleotide
  modified_base 37: mod_base = OTHER; note = 2'-O-methyl modified nucleotide
  modified_base 38: mod_base = OTHER; note = 2'-O-methyl modified nucleotide
  modified_base 39: mod_base = OTHER; note = 2'-O-methyl modified nucleotide
  modified_base 40: mod_base = OTHER; note = 2'-O-methyl modified nucleotide
  modified_base 69: mod_base = OTHER; note = 2'-O-methyl modified nucleotide
  modified_base 70: mod_base = OTHER; note = 2'-O-methyl modified nucleotide
  modified_base 71: mod_base = OTHER; note = 2'-O-methyl modified nucleotide
  modified_base 72: mod_base = OTHER; note = 2'-O-methyl modified nucleotide
  modified_base 73: mod_base = OTHER; note = 2'-O-methyl modified nucleotide
  modified_base 74: mod_base = OTHER; note = 2'-O-methyl modified nucleotide
  modified_base 75: mod_base = OTHER; note = 2'-O-methyl modified nucleotide
  modified_base 76: mod_base = OTHER; note = 2'-O-methyl modified nucleotide
  modified_base 77: mod_base = OTHER; note = 2'-O-methyl modified nucleotide
  modified_base 78: mod_base = OTHER; note = 2'-O-methyl modified nucleotide
  modified_base 79: mod_base = OTHER; note = 2'-O-methyl modified nucleotide
  modified_base 80: mod_base = OTHER; note = 2'-O-methyl modified nucleotide
  modified_base 81: mod_base = OTHER; note = 2'-O-methyl modified nucleotide
  modified_base 82: mod_base = OTHER; note = 2'-O-methyl modified nucleotide
  modified_base 83: mod_base = OTHER; note = 2'-O-methyl modified nucleotide
  modified_base 84: mod_base = OTHER; note = 2'-O-methyl modified nucleotide
  modified_base 85: mod_base = OTHER; note = 2'-O-methyl modified nucleotide
  modified_base 86: mod_base = OTHER; note = 2'-O-methyl modified nucleotide
  modified_base 87: mod_base = OTHER; note = 2'-O-methyl modified nucleotide
  modified_base 88: mod_base = OTHER; note = 2'-O-methyl modified nucleotide
  modified_base 89: mod_base = OTHER; note = 2'-O-methyl modified nucleotide
  modified_base 90: mod_base = OTHER; note = 2'-O-methyl modified nucleotide
  modified_base 91: mod_base = OTHER; note = 2'-O-methyl modified nucleotide
  modified_base 92: mod_base = OTHER; note = 2'-O-methyl modified nucleotide
  modified_base 93: mod_base = OTHER; note = 2'-O-methyl modified nucleotide
  modified_base 94: mod_base = OTHER; note = 2'-O-methyl modified nucleotide
  modified_base 95: mod_base = OTHER; note = 2'-O-methyl modified nucleotide
  modified_base 96: mod_base = OTHER; note = 2'-O-methyl modified nucleotide
  modified_base 108: mod_base = OTHER; note = Nucleotide with phosphorothioate linkage
  modified_base 109: mod_base = OTHER; note = 2'-O-methyl modified nucleotide with phosphorothioate linkage
  modified_base 110: mod_base = OTHER; note = 2'-O-methyl modified nucleotide with phosphorothioate linkage
  modified_base 111: mod_base = OTHER; note = 2'-O-methyl modified nucleotide
gctggtacacggcagggtcagttttagagctagaaatagcaagttaaaataaggctagtccgttatcaacttgaaaaagtggcaccgagtcggtgcccagaacccctgccg

SEQ ID NO: 16517 - RNA, 118 nt, synthetic construct
  source 1..118: mol_type = other RNA
  modified_base 1: mod_base = OTHER; note = 2'-O-methyl modified nucleotide with phosphorothioate linkage
  modified_base 2: mod_base = OTHER; note = 2'-O-methyl modified nucleotide with phosphorothioate linkage
  modified_base 3: mod_base = OTHER; note = 2'-O-methyl modified nucleotide with phosphorothioate linkage
  modified_base 29: mod_base = OTHER; note = 2'-O-methyl modified nucleotide
  modified_base 30: mod_base = OTHER; note = 2'-O-methyl modified nucleotide
  modified_base 31: mod_base = OTHER; note = 2'-O-methyl modified nucleotide
  modified_base 32: mod_base = OTHER; note = 2'-O-methyl modified nucleotide
  modified_base 33: mod_base = OTHER; note = 2'-O-methyl modified nucleotide
  modified_base 34: mod_base = OTHER; note = 2'-O-methyl modified nucleotide
  modified_base 35: mod_base = OTHER; note = 2'-O-methyl modified nucleotide
  modified_base 36: mod_base = OTHER; note = 2'-O-methyl modified nucleotide
  modified_base 37: mod_base = OTHER; note = 2'-O-methyl modified nucleotide
  modified_base 38: mod_base = OTHER; note = 2'-O-methyl modified nucleotide
  modified_base 39: mod_base = OTHER; note = 2'-O-methyl modified nucleotide
  modified_base 40: mod_base = OTHER; note = 2'-O-methyl modified nucleotide
  modified_base 69: mod_base = OTHER; note = 2'-O-methyl modified nucleotide
  modified_base 70: mod_base = OTHER; note = 2'-O-methyl modified nucleotide
  modified_base 71: mod_base = OTHER; note = 2'-O-methyl modified nucleotide
  modified_base 72: mod_base = OTHER; note = 2'-O-methyl modified nucleotide
  modified_base 73: mod_base = OTHER; note = 2'-O-methyl modified nucleotide
  modified_base 74: mod_base = OTHER; note = 2'-O-methyl modified nucleotide
  modified_base 75: mod_base = OTHER; note = 2'-O-methyl modified nucleotide
  modified_base 76: mod_base = OTHER; note = 2'-O-methyl modified nucleotide
  modified_base 77: mod_base = OTHER; note = 2'-O-methyl modified nucleotide
  modified_base 78: mod_base = OTHER; note = 2'-O-methyl modified nucleotide
  modified_base 79: mod_base = OTHER; note = 2'-O-methyl modified nucleotide
  modified_base 80: mod_base = OTHER; note = 2'-O-methyl modified nucleotide
  modified_base 81: mod_base = OTHER; note = 2'-O-methyl modified nucleotide
  modified_base 82: mod_base = OTHER; note = 2'-O-methyl modified nucleotide
  modified_base 83: mod_base = OTHER; note = 2'-O-methyl modified nucleotide
  modified_base 84: mod_base = OTHER; note = 2'-O-methyl modified nucleotide
  modified_base 85: mod_base = OTHER; note = 2'-O-methyl modified nucleotide
  modified_base 86: mod_base = OTHER; note = 2'-O-methyl modified nucleotide
  modified_base 87: mod_base = OTHER; note = 2'-O-methyl modified nucleotide
  modified_base 88: mod_base = OTHER; note = 2'-O-methyl modified nucleotide
  modified_base 89: mod_base = OTHER; note = 2'-O-methyl modified nucleotide
  modified_base 90: mod_base = OTHER; note = 2'-O-methyl modified nucleotide
  modified_base 91: mod_base = OTHER; note = 2'-O-methyl modified nucleotide
  modified_base 92: mod_base = OTHER; note = 2'-O-methyl modified nucleotide
  modified_base 93: mod_base = OTHER; note = 2'-O-methyl modified nucleotide
  modified_base 94: mod_base = OTHER; note = 2'-O-methyl modified nucleotide
  modified_base 95: mod_base = OTHER; note = 2'-O-methyl modified nucleotide
  modified_base 96: mod_base = OTHER; note = 2'-O-methyl modified nucleotide
  modified_base 115: mod_base = OTHER; note = Nucleotide with phosphorothioate linkage
  modified_base 116: mod_base = OTHER; note = 2'-O-methyl modified nucleotide with phosphorothioate linkage
  modified_base 117: mod_base = OTHER; note = 2'-O-methyl modified nucleotide with phosphorothioate linkage
  modified_base 118: mod_base = OTHER; note = 2'-O-methyl modified nucleotide
gctggtacacggcagggtcagttttagagctagaaatagcaagttaaaataaggctagtccgttatcaacttgaaaaagtggcaccgagtcggtgcatccagaacccctgccgtgtac

SEQ ID NO: 16518 - RNA, 117 nt, synthetic construct
  source 1..117: mol_type = other RNA
  modified_base 1: mod_base = OTHER; note = 2'-O-methyl modified nucleotide with phosphorothioate linkage
  modified_base 2: mod_base = OTHER; note = 2'-O-methyl modified nucleotide with phosphorothioate linkage
  modified_base 3: mod_base = OTHER; note = 2'-O-methyl modified nucleotide with phosphorothioate linkage
  modified_base 29: mod_base = OTHER; note = 2'-O-methyl modified nucleotide
  modified_base 30: mod_base = OTHER; note = 2'-O-methyl modified nucleotide
  modified_base 31: mod_base = OTHER; note = 2'-O-methyl modified nucleotide
  modified_base 32: mod_base = OTHER; note = 2'-O-methyl modified nucleotide
  modified_base 33: mod_base = OTHER; note = 2'-O-methyl modified nucleotide
  modified_base 34: mod_base = OTHER; note = 2'-O-methyl modified nucleotide
  modified_base 35: mod_base = OTHER; note = 2'-O-methyl modified nucleotide
  modified_base 36: mod_base = OTHER; note = 2'-O-methyl modified nucleotide
  modified_base 37: mod_base = OTHER; note = 2'-O-methyl modified nucleotide
  modified_base 38: mod_base = OTHER; note = 2'-O-methyl modified nucleotide
  modified_base 39: mod_base = OTHER; note = 2'-O-methyl modified nucleotide
  modified_base 40: mod_base = OTHER; note = 2'-O-methyl modified nucleotide
  modified_base 69: mod_base = OTHER; note = 2'-O-methyl modified nucleotide
  modified_base 70: mod_base = OTHER; note = 2'-O-methyl modified nucleotide
  modified_base 71: mod_base = OTHER; note = 2'-O-methyl modified nucleotide
  modified_base 72: mod_base = OTHER; note = 2'-O-methyl modified nucleotide
  modified_base 73: mod_base = OTHER; note = 2'-O-methyl modified nucleotide
  modified_base 74: mod_base = OTHER; note = 2'-O-methyl modified nucleotide
  modified_base 75: mod_base = OTHER; note = 2'-O-methyl modified nucleotide
  modified_base 76: mod_base = OTHER; note = 2'-O-methyl modified nucleotide
  modified_base 77: mod_base = OTHER; note = 2'-O-methyl modified nucleotide
  modified_base 78: mod_base = OTHER; note = 2'-O-methyl modified nucleotide
  modified_base 79: mod_base = OTHER; note = 2'-O-methyl modified nucleotide
  modified_base 80: mod_base = OTHER; note = 2'-O-methyl modified nucleotide
  modified_base 81: mod_base = OTHER; note = 2'-O-methyl modified nucleotide
  modified_base 82: mod_base = OTHER; note = 2'-O-methyl modified nucleotide
  modified_base 83: mod_base = OTHER; note = 2'-O-methyl modified nucleotide
  modified_base 84: mod_base = OTHER; note = 2'-O-methyl modified nucleotide
  modified_base 85: mod_base = OTHER; note = 2'-O-methyl modified nucleotide
  modified_base 86: mod_base = OTHER; note = 2'-O-methyl modified nucleotide
  modified_base 87: mod_base = OTHER; note = 2'-O-methyl modified nucleotide
  modified_base 88: mod_base = OTHER; note = 2'-O-methyl modified nucleotide
  modified_base 89: mod_base = OTHER; note = 2'-O-methyl modified nucleotide
  modified_base 90: mod_base = OTHER; note = 2'-O-methyl modified nucleotide
  modified_base 91: mod_base = OTHER; note = 2'-O-methyl modified nucleotide
  modified_base 92: mod_base = OTHER; note = 2'-O-methyl modified nucleotide
  modified_base 93: mod_base = OTHER; note = 2'-O-methyl modified nucleotide
  modified_base 94: mod_base = OTHER; note = 2'-O-methyl modified nucleotide
  modified_base 95: mod_base = OTHER; note = 2'-O-methyl modified nucleotide
  modified_base 96: mod_base = OTHER; note = 2'-O-methyl modified nucleotide
  modified_base 114: mod_base = OTHER; note = Nucleotide with phosphorothioate linkage
  modified_base 115: mod_base = OTHER; note = 2'-O-methyl modified nucleotide with phosphorothioate linkage
  modified_base 116: mod_base = OTHER; note = 2'-O-methyl modified nucleotide with phosphorothioate linkage
  modified_base 117: mod_base = OTHER; note = 2'-O-methyl modified nucleotide
gctggtacacggcagggtcagttttagagctagaaatagcaagttaaaataaggctagtccgttatcaacttgaaaaagtggcaccgagtcggtgcatccagaacccctgccgtgta

SEQ ID NO: 16519 - RNA, 116 nt, synthetic construct
  source 1..116: mol_type = other RNA
  modified_base 1: mod_base = OTHER; note = 2'-O-methyl modified nucleotide with phosphorothioate linkage
  modified_base 2: mod_base = OTHER; note = 2'-O-methyl modified nucleotide with phosphorothioate linkage
  modified_base 3: mod_base = OTHER; note = 2'-O-methyl modified nucleotide with phosphorothioate linkage
  modified_base 29: mod_base = OTHER; note = 2'-O-methyl modified nucleotide
  modified_base 30: mod_base = OTHER; note = 2'-O-methyl modified nucleotide
  modified_base 31: mod_base = OTHER; note = 2'-O-methyl modified nucleotide
  modified_base 32: mod_base = OTHER; note = 2'-O-methyl modified nucleotide
  modified_base 33: mod_base = OTHER; note = 2'-O-methyl modified nucleotide
  modified_base 34: mod_base = OTHER; note = 2'-O-methyl modified nucleotide
  modified_base 35: mod_base = OTHER; note = 2'-O-methyl modified nucleotide
  modified_base 36: mod_base = OTHER; note = 2'-O-methyl modified nucleotide
  modified_base 37: mod_base = OTHER; note = 2'-O-methyl modified nucleotide
  modified_base 38: mod_base = OTHER; note = 2'-O-methyl modified nucleotide
  modified_base 39: mod_base = OTHER; note = 2'-O-methyl modified nucleotide
  modified_base 40: mod_base = OTHER; note = 2'-O-methyl modified nucleotide
  modified_base 69: mod_base = OTHER; note = 2'-O-methyl modified nucleotide
  modified_base 70: mod_base = OTHER; note = 2'-O-methyl modified nucleotide
  modified_base 71: mod_base = OTHER; note = 2'-O-methyl modified nucleotide
  modified_base 72: mod_base = OTHER; note = 2'-O-methyl modified nucleotide
  modified_base 73: mod_base = OTHER; note = 2'-O-methyl modified nucleotide
  modified_base 74: mod_base = OTHER; note = 2'-O-methyl modified nucleotide
  modified_base 75: mod_base = OTHER; note = 2'-O-methyl modified nucleotide
  modified_base 76: mod_base = OTHER; note = 2'-O-methyl modified nucleotide
  modified_base 77: mod_base = OTHER; note = 2'-O-methyl modified nucleotide
  modified_base 78: mod_base = OTHER; note = 2'-O-methyl modified nucleotide
  modified_base 79: mod_base = OTHER; note = 2'-O-methyl modified nucleotide
  modified_base 80: mod_base = OTHER; note = 2'-O-methyl modified nucleotide
  modified_base 81: mod_base = OTHER; note = 2'-O-methyl modified nucleotide
  modified_base 82: mod_base = OTHER; note = 2'-O-methyl modified nucleotide
  modified_base 83: mod_base = OTHER; note = 2'-O-methyl modified nucleotide
  modified_base 84: mod_base = OTHER; note = 2'-O-methyl modified nucleotide
  modified_base 85: mod_base = OTHER; note = 2'-O-methyl modified nucleotide
  modified_base 86: mod_base = OTHER; note = 2'-O-methyl modified nucleotide
  modified_base 87: mod_base = OTHER; note = 2'-O-methyl modified nucleotide
  modified_base 88: mod_base = OTHER; note = 2'-O-methyl modified nucleotide
  modified_base 89: mod_base = OTHER; note = 2'-O-methyl modified nucleotide
  modified_base 90: mod_base = OTHER; note = 2'-O-methyl modified nucleotide
  modified_base 91: mod_base = OTHER; note = 2'-O-methyl modified nucleotide
  modified_base 92: mod_base = OTHER; note = 2'-O-methyl modified nucleotide
  modified_base 93: mod_base = OTHER; note = 2'-O-methyl modified nucleotide
  modified_base 94: mod_base = OTHER; note = 2'-O-methyl modified nucleotide
  modified_base 95: mod_base = OTHER; note = 2'-O-methyl modified nucleotide
  modified_base 96: mod_base = OTHER; note = 2'-O-methyl modified nucleotide
  modified_base 113: mod_base = OTHER; note = Nucleotide with phosphorothioate linkage
  modified_base 114: mod_base = OTHER; note = 2'-O-methyl modified nucleotide with phosphorothioate linkage
  modified_base 115: mod_base = OTHER; note = 2'-O-methyl modified nucleotide with phosphorothioate linkage
  modified_base 116: mod_base = OTHER; note = 2'-O-methyl modified nucleotide
gctggtacacggcagggtcagttttagagctagaaatagcaagttaaaataaggctagtccgttatcaacttgaaaaagtggcaccgagtcggtgcatccagaacccctgccgtgt

SEQ ID NO: 16520 - RNA, 115 nt, synthetic construct
  source 1..115: mol_type = other RNA
  modified_base 1: mod_base = OTHER; note = 2'-O-methyl modified nucleotide with phosphorothioate linkage
  modified_base 2: mod_base = OTHER; note = 2'-O-methyl modified nucleotide with phosphorothioate linkage
  modified_base 3: mod_base = OTHER; note = 2'-O-methyl modified nucleotide with phosphorothioate linkage
  modified_base 29: mod_base = OTHER; note = 2'-O-methyl modified nucleotide
  modified_base 30: mod_base = OTHER; note = 2'-O-methyl modified nucleotide
  modified_base 31: mod_base = OTHER; note = 2'-O-methyl modified nucleotide
  modified_base 32: mod_base = OTHER; note = 2'-O-methyl modified nucleotide
  modified_base 33: mod_base = OTHER; note = 2'-O-methyl modified nucleotide
  modified_base 34: mod_base = OTHER; note = 2'-O-methyl modified nucleotide
  modified_base 35: mod_base = OTHER; note = 2'-O-methyl modified nucleotide
  modified_base 36: mod_base = OTHER; note = 2'-O-methyl modified nucleotide
  modified_base 37: mod_base = OTHER; note = 2'-O-methyl modified nucleotide
  modified_base 38: mod_base = OTHER; note = 2'-O-methyl modified nucleotide
  modified_base 39: mod_base = OTHER; note = 2'-O-methyl modified nucleotide
  modified_base 40: mod_base = OTHER; note = 2'-O-methyl modified nucleotide
  modified_base 69: mod_base = OTHER; note = 2'-O-methyl modified nucleotide
  modified_base 70: mod_base = OTHER; note = 2'-O-methyl modified nucleotide
  modified_base 71: mod_base = OTHER; note = 2'-O-methyl modified nucleotide
  modified_base 72: mod_base = OTHER; note = 2'-O-methyl modified nucleotide
  modified_base 73: mod_base = OTHER; note = 2'-O-methyl modified nucleotide
  modified_base 74: mod_base = OTHER; note = 2'-O-methyl modified nucleotide
  modified_base 75: mod_base = OTHER; note = 2'-O-methyl modified nucleotide
  modified_base 76: mod_base = OTHER; note = 2'-O-methyl modified nucleotide
  modified_base 77: mod_base = OTHER; note = 2'-O-methyl modified nucleotide
  modified_base 78: mod_base = OTHER; note = 2'-O-methyl modified nucleotide
  modified_base 79: mod_base = OTHER; note = 2'-O-methyl modified nucleotide
  modified_base 80: mod_base = OTHER; note = 2'-O-methyl modified nucleotide
  modified_base 81: mod_base = OTHER; note = 2'-O-methyl modified nucleotide
  modified_base 82: mod_base = OTHER; note = 2'-O-methyl modified nucleotide
  modified_base 83: mod_base = OTHER; note = 2'-O-methyl modified nucleotide
  modified_base 84: mod_base = OTHER; note = 2'-O-methyl modified nucleotide
  modified_base 85: mod_base = OTHER; note = 2'-O-methyl modified nucleotide
  modified_base 86: mod_base = OTHER; note = 2'-O-methyl modified nucleotide
  modified_base 87: mod_base = OTHER; note = 2'-O-methyl modified nucleotide
  modified_base 88: mod_base = OTHER; note = 2'-O-methyl modified nucleotide
  modified_base 89: mod_base = OTHER; note = 2'-O-methyl modified nucleotide
  modified_base 90: mod_base = OTHER; note = 2'-O-methyl modified nucleotide
  modified_base 91: mod_base = OTHER; note = 2'-O-methyl modified nucleotide
  modified_base 92: mod_base = OTHER; note = 2'-O-methyl modified nucleotide
  modified_base 93: mod_base = OTHER; note = 2'-O-methyl modified nucleotide
  modified_base 94: mod_base = OTHER; note = 2'-O-methyl modified nucleotide
  modified_base 95: mod_base = OTHER; note = 2'-O-methyl modified nucleotide
  modified_base 96: mod_base = OTHER; note = 2'-O-methyl modified nucleotide
  modified_base 112: mod_base = OTHER; note = Nucleotide with phosphorothioate linkage
  modified_base 113: mod_base = OTHER; note = 2'-O-methyl modified nucleotide with phosphorothioate linkage
  modified_base 114: mod_base = OTHER; note = 2'-O-methyl modified nucleotide with phosphorothioate linkage
  modified_base 115: mod_base = OTHER; note = 2'-O-methyl modified nucleotide
gctggtacacggcagggtcagttttagagctagaaatagcaagttaaaataaggctagtccgttatcaacttgaaaaagtggcaccgagtcggtgcatccagaacccctgccgtg

SEQ ID NO: 16521 - RNA, 114 nt, synthetic construct
  source 1..114: mol_type = other RNA
  modified_base 1: mod_base = OTHER; note = 2'-O-methyl modified nucleotide with phosphorothioate linkage
  modified_base 2: mod_base = OTHER; note = 2'-O-methyl modified nucleotide with phosphorothioate linkage
  modified_base 3: mod_base = OTHER; note = 2'-O-methyl modified nucleotide with phosphorothioate linkage
  modified_base 29: mod_base = OTHER; note = 2'-O-methyl modified nucleotide
  modified_base 30: mod_base = OTHER; note = 2'-O-methyl modified nucleotide
  modified_base 31: mod_base = OTHER; note = 2'-O-methyl modified nucleotide
  modified_base 32: mod_base = OTHER; note = 2'-O-methyl modified nucleotide
  modified_base 33: mod_base = OTHER; note = 2'-O-methyl modified nucleotide
  modified_base 34: mod_base = OTHER; note = 2'-O-methyl modified nucleotide
  modified_base 35: mod_base = OTHER; note = 2'-O-methyl modified nucleotide
  modified_base 36: mod_base = OTHER; note = 2'-O-methyl modified nucleotide
  modified_base 37: mod_base = OTHER; note = 2'-O-methyl modified nucleotide
  modified_base 38: mod_base = OTHER; note = 2'-O-methyl modified nucleotide
  modified_base 39: mod_base = OTHER; note = 2'-O-methyl modified nucleotide
  modified_base 40: mod_base = OTHER; note = 2'-O-methyl modified nucleotide
  modified_base 69: mod_base = OTHER; note = 2'-O-methyl modified nucleotide
  modified_base 70: mod_base = OTHER; note = 2'-O-methyl modified nucleotide
  modified_base 71: mod_base = OTHER; note = 2'-O-methyl modified nucleotide
  modified_base 72: mod_base = OTHER; note = 2'-O-methyl modified nucleotide
  modified_base 73: mod_base = OTHER; note = 2'-O-methyl modified nucleotide
  modified_base 74: mod_base = OTHER; note = 2'-O-methyl modified nucleotide
  modified_base 75: mod_base = OTHER; note = 2'-O-methyl modified nucleotide
  modified_base 76: mod_base = OTHER; note = 2'-O-methyl modified nucleotide
  modified_base 77: mod_base = OTHER; note = 2'-O-methyl modified nucleotide
  modified_base 78: mod_base = OTHER; note = 2'-O-methyl modified nucleotide
  modified_base 79: mod_base = OTHER; note = 2'-O-methyl modified nucleotide
  modified_base 80: mod_base = OTHER; note = 2'-O-methyl modified nucleotide
  modified_base 81: mod_base = OTHER; note = 2'-O-methyl modified nucleotide
  modified_base 82: mod_base = OTHER; note = 2'-O-methyl modified nucleotide
  modified_base 83: mod_base = OTHER; note = 2'-O-methyl modified nucleotide
  modified_base 84: mod_base = OTHER; note = 2'-O-methyl modified nucleotide
  modified_base 85: mod_base = OTHER; note = 2'-O-methyl modified nucleotide
  modified_base 86: mod_base = OTHER; note = 2'-O-methyl modified nucleotide
  modified_base 87: mod_base = OTHER; note = 2'-O-methyl modified nucleotide
  modified_base 88: mod_base = OTHER; note = 2'-O-methyl modified nucleotide
  modified_base 89: mod_base = OTHER; note = 2'-O-methyl modified nucleotide
  modified_base 90: mod_base = OTHER; note = 2'-O-methyl modified nucleotide
  modified_base 91: mod_base = OTHER; note = 2'-O-methyl modified nucleotide
  modified_base 92: mod_base = OTHER; note = 2'-O-methyl modified nucleotide
  modified_base 93: mod_base = OTHER; note = 2'-O-methyl modified nucleotide
  modified_base 94: mod_base = OTHER; note = 2'-O-methyl modified nucleotide
  modified_base 95: mod_base = OTHER; note = 2'-O-methyl modified nucleotide
  modified_base 96: mod_base = OTHER; note = 2'-O-methyl modified nucleotide
  modified_base 111: mod_base = OTHER; note = Nucleotide with phosphorothioate linkage
  modified_base 112: mod_base = OTHER; note = 2'-O-methyl modified nucleotide with phosphorothioate linkage
  modified_base 113: mod_base = OTHER; note = 2'-O-methyl modified nucleotide with phosphorothioate linkage
  modified_base 114: mod_base = OTHER; note = 2'-O-methyl modified nucleotide
gctggtacacggcagggtcagttttagagctagaaatagcaagttaaaataaggctagtccgttatcaacttgaaaaagtggcaccgagtcggtgcatccagaacccctgccgt

SEQ ID NO: 16522 - RNA, 113 nt, synthetic construct
  source 1..113: mol_type = other RNA
  modified_base 1: mod_base = OTHER; note = 2'-O-methyl modified nucleotide with phosphorothioate linkage
  modified_base 2: mod_base = OTHER; note = 2'-O-methyl modified nucleotide with phosphorothioate linkage
  modified_base 3: mod_base = OTHER; note = 2'-O-methyl modified nucleotide with phosphorothioate linkage
  modified_base 29: mod_base = OTHER; note = 2'-O-methyl modified nucleotide
  modified_base 30: mod_base = OTHER; note = 2'-O-methyl modified nucleotide
  modified_base 31: mod_base = OTHER; note = 2'-O-methyl modified nucleotide
  modified_base 32: mod_base = OTHER; note = 2'-O-methyl modified nucleotide
  modified_base 33: mod_base = OTHER; note = 2'-O-methyl modified nucleotide
  modified_base 34: mod_base = OTHER; note = 2'-O-methyl modified nucleotide
  modified_base 35: mod_base = OTHER; note = 2'-O-methyl modified nucleotide
  modified_base 36: mod_base = OTHER; note = 2'-O-methyl modified nucleotide
  modified_base 37: mod_base = OTHER; note = 2'-O-methyl modified nucleotide
  modified_base 38: mod_base = OTHER; note = 2'-O-methyl modified nucleotide
  modified_base 39: mod_base = OTHER; note = 2'-O-methyl modified nucleotide
  modified_base 40: mod_base = OTHER; note = 2'-O-methyl modified nucleotide
  modified_base 69: mod_base = OTHER; note = 2'-O-methyl modified nucleotide
  modified_base 70: mod_base = OTHER; note = 2'-O-methyl modified nucleotide
  modified_base 71: mod_base = OTHER; note = 2'-O-methyl modified nucleotide
  modified_base 72: mod_base = OTHER; note = 2'-O-methyl modified nucleotide
  modified_base 73: mod_base = OTHER; note = 2'-O-methyl modified nucleotide
  modified_base 74: mod_base = OTHER; note = 2'-O-methyl modified nucleotide
  modified_base 75: mod_base = OTHER; note = 2'-O-methyl modified nucleotide
  modified_base 76: mod_base = OTHER; note = 2'-O-methyl modified nucleotide
  modified_base 77: mod_base = OTHER; note = 2'-O-methyl modified nucleotide
  modified_base 78: mod_base = OTHER; note = 2'-O-methyl modified nucleotide
  modified_base 79: mod_base = OTHER; note = 2'-O-methyl modified nucleotide
  modified_base 80: mod_base = OTHER; note = 2'-O-methyl modified nucleotide
  modified_base 81: mod_base = OTHER; note = 2'-O-methyl modified nucleotide
  modified_base 82: mod_base = OTHER; note = 2'-O-methyl modified nucleotide
  modified_base 83: mod_base = OTHER; note = 2'-O-methyl modified nucleotide
  modified_base 84: mod_base = OTHER; note = 2'-O-methyl modified nucleotide
  modified_base 85: mod_base = OTHER; note = 2'-O-methyl modified nucleotide
  modified_base 86: mod_base = OTHER; note = 2'-O-methyl modified nucleotide
  modified_base 87: mod_base = OTHER; note = 2'-O-methyl modified nucleotide
  modified_base 88: mod_base = OTHER; note = 2'-O-methyl modified nucleotide
  modified_base 89: mod_base = OTHER; note = 2'-O-methyl modified nucleotide
  modified_base 90: mod_base = OTHER; note = 2'-O-methyl modified nucleotide
  modified_base 91: mod_base = OTHER; note = 2'-O-methyl modified nucleotide
  modified_base 92: mod_base = OTHER; note = 2'-O-methyl modified nucleotide
  modified_base 93: mod_base = OTHER; note = 2'-O-methyl modified nucleotide
  modified_base 94: mod_base = OTHER; note = 2'-O-methyl modified nucleotide
  modified_base 95: mod_base = OTHER; note = 2'-O-methyl modified nucleotide
  modified_base 96: mod_base = OTHER; note = 2'-O-methyl modified nucleotide
  modified_base 110: mod_base = OTHER; note = Nucleotide with phosphorothioate linkage
  modified_base 111: mod_base = OTHER; note = 2'-O-methyl modified nucleotide with phosphorothioate linkage
  modified_base 112: mod_base = OTHER; note = 2'-O-methyl modified nucleotide with phosphorothioate linkage
  modified_base 113: mod_base = OTHER; note = 2'-O-methyl modified nucleotide
gctggtacacggcagggtcagttttagagctagaaatagcaagttaaaataaggctagtccgttatcaacttgaaaaagtggcaccgagtcggtgcatccagaacccctgccg

SEQ ID NO: 16523 - RNA, 120 nt, synthetic construct
  source 1..120: mol_type = other RNA
  modified_base 1: mod_base = OTHER; note = 2'-O-methyl modified nucleotide with phosphorothioate linkage
  modified_base 2: mod_base = OTHER; note = 2'-O-methyl modified nucleotide with phosphorothioate linkage
  modified_base 3: mod_base = OTHER; note = 2'-O-methyl modified nucleotide with phosphorothioate linkage
  modified_base 29: mod_base = OTHER; note = 2'-O-methyl modified nucleotide
  modified_base 30: mod_base = OTHER; note = 2'-O-methyl modified nucleotide
  modified_base 31: mod_base = OTHER; note = 2'-O-methyl modified nucleotide
  modified_base 32: mod_base = OTHER; note = 2'-O-methyl modified nucleotide
  modified_base 33: mod_base = OTHER; note = 2'-O-methyl modified nucleotide
  modified_base 34: mod_base = OTHER; note = 2'-O-methyl modified nucleotide
  modified_base 35: mod_base = OTHER; note = 2'-O-methyl modified nucleotide
  modified_base 36: mod_base = OTHER; note = 2'-O-methyl modified nucleotide
  modified_base 37: mod_base = OTHER; note = 2'-O-methyl modified nucleotide
  modified_base 38: mod_base = OTHER; note = 2'-O-methyl modified nucleotide
  modified_base 39: mod_base = OTHER; note = 2'-O-methyl modified nucleotide
  modified_base 40: mod_base = OTHER; note = 2'-O-methyl modified nucleotide
  modified_base 69: mod_base = OTHER; note = 2'-O-methyl modified nucleotide
  modified_base 70: mod_base = OTHER; note = 2'-O-methyl modified nucleotide
  modified_base 71: mod_base = OTHER; note = 2'-O-methyl modified nucleotide
  modified_base 72: mod_base = OTHER; note = 2'-O-methyl modified nucleotide
  modified_base 73: mod_base = OTHER; note = 2'-O-methyl modified nucleotide
  modified_base 74: mod_base = OTHER; note = 2'-O-methyl modified nucleotide
  modified_base 75: mod_base = OTHER; note = 2'-O-methyl modified nucleotide
  modified_base 76: mod_base = OTHER; note = 2'-O-methyl modified nucleotide
  modified_base 77: mod_base = OTHER; note = 2'-O-methyl modified nucleotide
  modified_base 78: mod_base = OTHER; note = 2'-O-methyl modified nucleotide
  modified_base 79: mod_base = OTHER; note = 2'-O-methyl modified nucleotide
  modified_base 80: mod_base = OTHER; note = 2'-O-methyl modified nucleotide
  modified_base 81: mod_base = OTHER; note = 2'-O-methyl modified nucleotide
  modified_base 82: mod_base = OTHER; note = 2'-O-methyl modified nucleotide
  modified_base 83: mod_base = OTHER; note = 2'-O-methyl modified nucleotide
  modified_base 84: mod_base = OTHER; note = 2'-O-methyl modified nucleotide
  modified_base 85: mod_base = OTHER; note = 2'-O-methyl modified nucleotide
  modified_base 86: mod_base = OTHER; note = 2'-O-methyl modified nucleotide
  modified_base 87: mod_base = OTHER; note = 2'-O-methyl modified nucleotide
  modified_base 88: mod_base = OTHER; note = 2'-O-methyl modified nucleotide
  modified_base 89: mod_base = OTHER; note = 2'-O-methyl modified nucleotide
  modified_base 90: mod_base = OTHER; note = 2'-O-methyl modified nucleotide
  modified_base 91: mod_base = OTHER; note = 2'-O-methyl modified nucleotide
  modified_base 92: mod_base = OTHER; note = 2'-O-methyl modified nucleotide
  modified_base 93: mod_base = OTHER; note = 2'-O-methyl modified nucleotide
  modified_base 94: mod_base = OTHER; note = 2'-O-methyl modified nucleotide
  modified_base 95: mod_base = OTHER; note = 2'-O-methyl modified nucleotide
  modified_base 96: mod_base = OTHER; note = 2'-O-methyl modified nucleotide
  modified_base 117: mod_base = OTHER; note = Nucleotide with phosphorothioate linkage
  modified_base 118: mod_base = OTHER; note = 2'-O-methyl modified nucleotide with phosphorothioate linkage
  modified_base 119: mod_base = OTHER; note = 2'-O-methyl modified nucleotide with phosphorothioate linkage
  modified_base 120: mod_base = OTHER; note = 2'-O-methyl modified nucleotide
gctggtacacggcagggtcagttttagagctagaaatagcaagttaaaataaggctagtccgttatcaacttgaaaaagtggcaccgagtcggtgcatatccagaacccctgccgtgtac

SEQ ID NO: 16524 - RNA, 119 nt, synthetic construct
  source 1..119: mol_type = other RNA
  modified_base 1: mod_base = OTHER; note = 2'-O-methyl modified nucleotide with phosphorothioate linkage
  modified_base 2: mod_base = OTHER; note = 2'-O-methyl modified nucleotide with phosphorothioate linkage
  modified_base 3: mod_base = OTHER; note = 2'-O-methyl modified nucleotide with phosphorothioate linkage
  modified_base 29: mod_base = OTHER; note = 2'-O-methyl modified nucleotide
  modified_base 30: mod_base = OTHER; note = 2'-O-methyl modified nucleotide
  modified_base 31: mod_base = OTHER; note = 2'-O-methyl modified nucleotide
  modified_base 32: mod_base = OTHER; note = 2'-O-methyl modified nucleotide
  modified_base 33: mod_base = OTHER; note = 2'-O-methyl modified nucleotide
  modified_base 34: mod_base = OTHER; note = 2'-O-methyl modified nucleotide
  modified_base 35: mod_base = OTHER; note = 2'-O-methyl modified nucleotide
  modified_base 36: mod_base = OTHER; note = 2'-O-methyl modified nucleotide
  modified_base 37: mod_base = OTHER; note = 2'-O-methyl modified nucleotide
  modified_base 38: mod_base = OTHER; note = 2'-O-methyl modified nucleotide
  modified_base 39: mod_base = OTHER; note = 2'-O-methyl modified nucleotide
  modified_base 40: mod_base = OTHER; note = 2'-O-methyl modified nucleotide
  modified_base 69: mod_base = OTHER; note = 2'-O-methyl modified nucleotide
  modified_base 70: mod_base = OTHER; note = 2'-O-methyl modified nucleotide
  modified_base 71: mod_base = OTHER; note = 2'-O-methyl modified nucleotide
  modified_base 72: mod_base = OTHER; note = 2'-O-methyl modified nucleotide
  modified_base 73: mod_base = OTHER; note = 2'-O-methyl modified nucleotide
  modified_base 74: mod_base = OTHER; note = 2'-O-methyl modified nucleotide
  modified_base 75: mod_base = OTHER; note = 2'-O-methyl modified nucleotide
  modified_base 76: mod_base = OTHER; note = 2'-O-methyl modified nucleotide
  modified_base 77: mod_base = OTHER; note = 2'-O-methyl modified nucleotide
  modified_base 78: mod_base = OTHER; note = 2'-O-methyl modified nucleotide
  modified_base 79: mod_base = OTHER; note = 2'-O-methyl modified nucleotide
  modified_base 80: mod_base = OTHER; note = 2'-O-methyl modified nucleotide
  modified_base 81: mod_base = OTHER; note = 2'-O-methyl modified nucleotide
  modified_base 82: mod_base = OTHER; note = 2'-O-methyl modified nucleotide
  modified_base 83: mod_base = OTHER; note = 2'-O-methyl modified nucleotide
  modified_base 84: mod_base = OTHER; note = 2'-O-methyl modified nucleotide
  modified_base 85: mod_base = OTHER; note = 2'-O-methyl modified nucleotide
  modified_base 86: mod_base = OTHER; note = 2'-O-methyl modified nucleotide
  modified_base 87: mod_base = OTHER; note = 2'-O-methyl modified nucleotide
  modified_base 88: mod_base = OTHER; note = 2'-O-methyl modified nucleotide
  modified_base 89: mod_base = OTHER; note = 2'-O-methyl modified nucleotide
  modified_base 90: mod_base = OTHER; note = 2'-O-methyl modified nucleotide
  modified_base 91: mod_base = OTHER; note = 2'-O-methyl modified nucleotide
  modified_base 92: mod_base = OTHER; note = 2'-O-methyl modified nucleotide
  modified_base 93: mod_base = OTHER; note = 2'-O-methyl modified nucleotide
  modified_base 94: mod_base = OTHER; note = 2'-O-methyl modified nucleotide
  modified_base 95: mod_base = OTHER; note = 2'-O-methyl modified nucleotide
  modified_base 96: mod_base = OTHER; note = 2'-O-methyl modified nucleotide
  modified_base 116: mod_base = OTHER; note = Nucleotide with phosphorothioate linkage
  modified_base 117: mod_base = OTHER; note = 2'-O-methyl modified nucleotide with phosphorothioate linkage
  modified_base 118: mod_base = OTHER; note = 2'-O-methyl modified nucleotide with phosphorothioate linkage
  modified_base 119: mod_base = OTHER; note = 2'-O-methyl modified nucleotide
gctggtacacggcagggtcagttttagagctagaaatagcaagttaaaataaggctagtccgttatcaacttgaaaaagtggcaccgagtcggtgcatatccagaacccctgccgtgta

SEQ ID NO: 16525 - RNA, 118 nt, synthetic construct
  source 1..118: mol_type = other RNA
  modified_base 1: mod_base = OTHER; note = 2'-O-methyl modified nucleotide with phosphorothioate linkage
  modified_base 2: mod_base = OTHER; note = 2'-O-methyl modified nucleotide with phosphorothioate linkage
  modified_base 3: mod_base = OTHER; note = 2'-O-methyl modified nucleotide with phosphorothioate linkage
  modified_base 29: mod_base = OTHER; note = 2'-O-methyl modified nucleotide
  modified_base 30: mod_base = OTHER; note = 2'-O-methyl modified nucleotide
  modified_base 31: mod_base = OTHER; note = 2'-O-methyl modified nucleotide
  modified_base 32: mod_base = OTHER; note = 2'-O-methyl modified nucleotide
  modified_base 33: mod_base = OTHER; note = 2'-O-methyl modified nucleotide
  modified_base 34: mod_base = OTHER; note = 2'-O-methyl modified nucleotide
  modified_base 35: mod_base = OTHER; note = 2'-O-methyl modified nucleotide
  modified_base 36: mod_base = OTHER; note = 2'-O-methyl modified nucleotide
  modified_base 37: mod_base = OTHER; note = 2'-O-methyl modified nucleotide
  modified_base 38: mod_base = OTHER; note = 2'-O-methyl modified nucleotide
  modified_base 39: mod_base = OTHER; note = 2'-O-methyl modified nucleotide
  modified_base 40: mod_base = OTHER; note = 2'-O-methyl modified nucleotide
  modified_base 69: mod_base = OTHER; note = 2'-O-methyl modified nucleotide
  modified_base 70: mod_base = OTHER; note = 2'-O-methyl modified nucleotide
  modified_base 71: mod_base = OTHER; note = 2'-O-methyl modified nucleotide
  modified_base 72: mod_base = OTHER; note = 2'-O-methyl modified nucleotide
  modified_base 73: mod_base = OTHER; note = 2'-O-methyl modified nucleotide
  modified_base 74: mod_base = OTHER; note = 2'-O-methyl modified nucleotide
  modified_base 75: mod_base = OTHER; note = 2'-O-methyl modified nucleotide
  modified_base 76: mod_base = OTHER; note = 2'-O-methyl modified nucleotide
  modified_base 77: mod_base = OTHER; note = 2'-O-methyl modified nucleotide
  modified_base 78: mod_base = OTHER; note = 2'-O-methyl modified nucleotide
  modified_base 79: mod_base = OTHER; note = 2'-O-methyl modified nucleotide
  modified_base 80: mod_base = OTHER; note = 2'-O-methyl modified nucleotide
  modified_base 81: mod_base = OTHER; note = 2'-O-methyl modified nucleotide
  modified_base 82: mod_base = OTHER; note = 2'-O-methyl modified nucleotide
  modified_base 83: mod_base = OTHER; note = 2'-O-methyl modified nucleotide
  modified_base 84: mod_base = OTHER; note = 2'-O-methyl modified nucleotide
  modified_base 85: mod_base = OTHER; note = 2'-O-methyl modified nucleotide
  modified_base 86: mod_base = OTHER; note = 2'-O-methyl modified nucleotide
  modified_base 87: mod_base = OTHER; note = 2'-O-methyl modified nucleotide
  modified_base 88: mod_base = OTHER; note = 2'-O-methyl modified nucleotide
  modified_base 89: mod_base = OTHER; note = 2'-O-methyl modified nucleotide
  modified_base 90: mod_base = OTHER; note = 2'-O-methyl modified nucleotide
  modified_base 91: mod_base = OTHER; note = 2'-O-methyl modified nucleotide
  modified_base 92: mod_base = OTHER; note = 2'-O-methyl modified nucleotide
  modified_base 93: mod_base = OTHER; note = 2'-O-methyl modified nucleotide
  modified_base 94: mod_base = OTHER; note = 2'-O-methyl modified nucleotide
  modified_base 95: mod_base = OTHER; note = 2'-O-methyl modified nucleotide
  modified_base 96: mod_base = OTHER; note = 2'-O-methyl modified nucleotide
  modified_base 115: mod_base = OTHER; note = Nucleotide with phosphorothioate linkage
  modified_base 116: mod_base = OTHER; note = 2'-O-methyl modified nucleotide with phosphorothioate linkage
  modified_base 117: mod_base = OTHER; note = 2'-O-methyl modified nucleotide with phosphorothioate linkage
  modified_base 118: mod_base = OTHER; note = 2'-O-methyl modified nucleotide
gctggtacacggcagggtcagttttagagctagaaatagcaagttaaaataaggctagtccgttatcaacttgaaaaagtggcaccgagtcggtgcatatccagaacccctgccgtgt

SEQ ID NO: 16526 - RNA, 117 nt, synthetic construct
  source 1..117: mol_type = other RNA
  modified_base 1: mod_base = OTHER; note = 2'-O-methyl modified nucleotide with phosphorothioate linkage
  modified_base 2: mod_base = OTHER; note = 2'-O-methyl modified nucleotide with phosphorothioate linkage
  modified_base 3: mod_base = OTHER; note = 2'-O-methyl modified nucleotide with phosphorothioate linkage
  modified_base 29: mod_base = OTHER; note = 2'-O-methyl modified nucleotide
  modified_base 30: mod_base = OTHER; note = 2'-O-methyl modified nucleotide
  modified_base 31: mod_base = OTHER; note = 2'-O-methyl modified nucleotide
  modified_base 32: mod_base = OTHER; note = 2'-O-methyl modified nucleotide
  modified_base 33: mod_base = OTHER; note = 2'-O-methyl modified nucleotide
  modified_base 34: mod_base = OTHER; note = 2'-O-methyl modified nucleotide
  modified_base 35: mod_base = OTHER; note = 2'-O-methyl modified nucleotide
  modified_base 36: mod_base = OTHER; note = 2'-O-methyl modified nucleotide
  modified_base 37: mod_base = OTHER; note = 2'-O-methyl modified nucleotide
  modified_base 38: mod_base = OTHER; note = 2'-O-methyl modified nucleotide
  modified_base 39: mod_base = OTHER; note = 2'-O-methyl modified nucleotide
  modified_base 40: mod_base = OTHER; note = 2'-O-methyl modified nucleotide
  modified_base 69: mod_base = OTHER; note = 2'-O-methyl modified nucleotide
  modified_base 70: mod_base = OTHER; note = 2'-O-methyl modified nucleotide
  modified_base 71: mod_base = OTHER; note = 2'-O-methyl modified nucleotide
  modified_base 72: mod_base = OTHER; note = 2'-O-methyl modified nucleotide
  modified_base 73: mod_base = OTHER; note = 2'-O-methyl modified nucleotide
  modified_base 74: mod_base = OTHER; note = 2'-O-methyl modified nucleotide
  modified_base 75: mod_base = OTHER; note = 2'-O-methyl modified nucleotide
  modified_base 76: mod_base = OTHER; note = 2'-O-methyl modified nucleotide
  modified_base 77: mod_base = OTHER; note = 2'-O-methyl modified nucleotide
  modified_base 78: mod_base = OTHER; note = 2'-O-methyl modified nucleotide
  modified_base 79: mod_base = OTHER; note = 2'-O-methyl modified nucleotide
  modified_base 80: mod_base = OTHER; note = 2'-O-methyl modified nucleotide
  modified_base 81: mod_base = OTHER; note = 2'-O-methyl modified nucleotide
  modified_base 82: mod_base = OTHER; note = 2'-O-methyl modified nucleotide
  modified_base 83: mod_base = OTHER; note = 2'-O-methyl modified nucleotide
  modified_base 84: mod_base = OTHER; note = 2'-O-methyl modified nucleotide
  modified_base 85: mod_base = OTHER; note = 2'-O-methyl modified nucleotide
  modified_base 86: mod_base = OTHER; note = 2'-O-methyl modified nucleotide
  modified_base 87: mod_base = OTHER; note = 2'-O-methyl modified nucleotide
  modified_base 88: mod_base = OTHER; note = 2'-O-methyl modified nucleotide
  modified_base 89: mod_base = OTHER; note = 2'-O-methyl modified nucleotide
  modified_base 90: mod_base = OTHER; note = 2'-O-methyl modified nucleotide
  modified_base 91: mod_base = OTHER; note = 2'-O-methyl modified nucleotide
  modified_base 92: mod_base = OTHER; note = 2'-O-methyl modified nucleotide
  modified_base 93: mod_base = OTHER; note = 2'-O-methyl modified nucleotide
  modified_base 94: mod_base = OTHER; note = 2'-O-methyl modified nucleotide
  modified_base 95: mod_base = OTHER; note = 2'-O-methyl modified nucleotide
  modified_base 96: mod_base = OTHER; note = 2'-O-methyl modified nucleotide
  modified_base 114: mod_base = OTHER; note = Nucleotide with phosphorothioate linkage
  modified_base 115: mod_base = OTHER; note = 2'-O-methyl modified nucleotide with phosphorothioate linkage
  modified_base 116: mod_base = OTHER; note = 2'-O-methyl modified nucleotide with phosphorothioate linkage
  modified_base 117: mod_base = OTHER; note = 2'-O-methyl modified nucleotide
gctggtacacggcagggtcagttttagagctagaaatagcaagttaaaataaggctagtccgttatcaacttgaaaaagtggcaccgagtcggtgcatatccagaacccctgccgtg

SEQ ID NO: 16527 - RNA, 116 nt, synthetic construct
  source 1..116: mol_type = other RNA
  modified_base 1: mod_base = OTHER; note = 2'-O-methyl modified nucleotide with phosphorothioate linkage
  modified_base 2: mod_base = OTHER; note = 2'-O-methyl modified nucleotide with phosphorothioate linkage
  modified_base 3: mod_base = OTHER; note = 2'-O-methyl modified nucleotide with phosphorothioate linkage
  modified_base 29: mod_base = OTHER; note = 2'-O-methyl modified nucleotide
  modified_base 30: mod_base = OTHER; note = 2'-O-methyl modified nucleotide
  modified_base 31: mod_base = OTHER; note = 2'-O-methyl modified nucleotide
  modified_base 32: mod_base = OTHER; note = 2'-O-methyl modified nucleotide
  modified_base 33: mod_base = OTHER; note = 2'-O-methyl modified nucleotide
  modified_base 34: mod_base = OTHER; note = 2'-O-methyl modified nucleotide
  modified_base 35: mod_base = OTHER; note = 2'-O-methyl modified nucleotide
  modified_base 36: mod_base = OTHER; note = 2'-O-methyl modified nucleotide
  modified_base 37: mod_base = OTHER; note = 2'-O-methyl modified nucleotide
  modified_base 38: mod_base = OTHER; note = 2'-O-methyl modified nucleotide
  modified_base 39: mod_base = OTHER; note = 2'-O-methyl modified nucleotide
  modified_base 40: mod_base = OTHER; note = 2'-O-methyl modified nucleotide
  modified_base 69: mod_base = OTHER; note = 2'-O-methyl modified nucleotide
  modified_base 70: mod_base = OTHER; note = 2'-O-methyl modified nucleotide
  modified_base 71: mod_base = OTHER; note = 2'-O-methyl modified nucleotide
  modified_base 72: mod_base = OTHER; note = 2'-O-methyl modified nucleotide
  modified_base 73: mod_base = OTHER; note = 2'-O-methyl modified nucleotide
  modified_base 74: mod_base = OTHER; note = 2'-O-methyl modified nucleotide
  modified_base 75: mod_base = OTHER; note = 2'-O-methyl modified nucleotide
  modified_base 76: mod_base = OTHER; note = 2'-O-methyl modified nucleotide
  modified_base 77: mod_base = OTHER; note = 2'-O-methyl modified nucleotide
  modified_base 78: mod_base = OTHER; note = 2'-O-methyl modified nucleotide
  modified_base 79: mod_base = OTHER; note = 2'-O-methyl modified nucleotide
  modified_base 80: mod_base = OTHER; note = 2'-O-methyl modified nucleotide
  modified_base 81: mod_base = OTHER; note = 2'-O-methyl modified nucleotide
  modified_base 82: mod_base = OTHER; note = 2'-O-methyl modified nucleotide
  modified_base 83: mod_base = OTHER; note = 2'-O-methyl modified nucleotide
  modified_base 84: mod_base = OTHER; note = 2'-O-methyl modified nucleotide
  modified_base 85: mod_base = OTHER; note = 2'-O-methyl modified nucleotide
  modified_base 86: mod_base = OTHER; note = 2'-O-methyl modified nucleotide
  modified_base 87: mod_base = OTHER; note = 2'-O-methyl modified nucleotide
  modified_base 88: mod_base = OTHER; note = 2'-O-methyl modified nucleotide
  modified_base 89: mod_base = OTHER; note = 2'-O-methyl modified nucleotide
  modified_base 90: mod_base = OTHER; note = 2'-O-methyl modified nucleotide
  modified_base 91: mod_base = OTHER; note = 2'-O-methyl modified nucleotide
  modified_base 92: mod_base = OTHER; note = 2'-O-methyl modified nucleotide
  modified_base 93: mod_base = OTHER; note = 2'-O-methyl modified nucleotide
  modified_base 94: mod_base = OTHER; note = 2'-O-methyl modified nucleotide
  modified_base 95: mod_base = OTHER; note = 2'-O-methyl modified nucleotide
  modified_base 96: mod_base = OTHER; note = 2'-O-methyl modified nucleotide
  modified_base 113: mod_base = OTHER; note = Nucleotide with phosphorothioate linkage
  modified_base 114: mod_base = OTHER; note = 2'-O-methyl modified nucleotide with phosphorothioate linkage
  modified_base 115: mod_base = OTHER; note = 2'-O-methyl modified nucleotide with phosphorothioate linkage
  modified_base 116: mod_base = OTHER; note = 2'-O-methyl modified nucleotide
gctggtacacggcagggtcagttttagagctagaaatagcaagttaaaataaggctagtccgttatcaacttgaaaaagtggcaccgagtcggtgcatatccagaacccctgccgt

SEQ ID NO: 16528 - RNA, 115 nt, synthetic construct
  source 1..115: mol_type = other RNA
  modified_base 1: mod_base = OTHER; note = 2'-O-methyl modified nucleotide with phosphorothioate linkage
  modified_base 2: mod_base = OTHER; note = 2'-O-methyl modified nucleotide with phosphorothioate linkage
  modified_base 3: mod_base = OTHER; note = 2'-O-methyl modified nucleotide with phosphorothioate linkage
  modified_base 29: mod_base = OTHER; note = 2'-O-methyl modified nucleotide
  modified_base 30: mod_base = OTHER; note = 2'-O-methyl modified nucleotide
  modified_base 31: mod_base = OTHER; note = 2'-O-methyl modified nucleotide
  modified_base 32: mod_base = OTHER; note = 2'-O-methyl modified nucleotide
  modified_base 33: mod_base = OTHER; note = 2'-O-methyl modified nucleotide
  modified_base 34: mod_base = OTHER; note = 2'-O-methyl modified nucleotide
  modified_base 35: mod_base = OTHER; note = 2'-O-methyl modified nucleotide
  modified_base 36: mod_base = OTHER; note = 2'-O-methyl modified nucleotide
  modified_base 37: mod_base = OTHER; note = 2'-O-methyl modified nucleotide
  modified_base 38: mod_base = OTHER; note = 2'-O-methyl modified nucleotide
  modified_base 39: mod_base = OTHER; note = 2'-O-methyl modified nucleotide
  modified_base 40: mod_base = OTHER; note = 2'-O-methyl modified nucleotide
  modified_base 69: mod_base = OTHER; note = 2'-O-methyl modified nucleotide
  modified_base 70: mod_base = OTHER; note = 2'-O-methyl modified nucleotide
  modified_base 71: mod_base = OTHER; note = 2'-O-methyl modified nucleotide
  modified_base 72: mod_base = OTHER; note = 2'-O-methyl modified nucleotide
  modified_base 73: mod_base = OTHER; note = 2'-O-methyl modified nucleotide
  modified_base 74: mod_base = OTHER; note = 2'-O-methyl modified nucleotide
  modified_base 75: mod_base = OTHER; note = 2'-O-methyl modified nucleotide
  modified_base 76: mod_base = OTHER; note = 2'-O-methyl modified nucleotide
  modified_base 77: mod_base = OTHER; note = 2'-O-methyl modified nucleotide
  modified_base 78: mod_base = OTHER; note = 2'-O-methyl modified nucleotide
  modified_base 79: mod_base = OTHER; note = 2'-O-methyl modified nucleotide
  modified_base 80: mod_base = OTHER; note = 2'-O-methyl modified nucleotide
  modified_base 81: mod_base = OTHER; note = 2'-O-methyl modified nucleotide
  modified_base 82: mod_base = OTHER; note = 2'-O-methyl modified nucleotide
  modified_base 83: mod_base = OTHER; note = 2'-O-methyl modified nucleotide
  modified_base 84: mod_base = OTHER; note = 2'-O-methyl modified nucleotide
  modified_base 85: mod_base = OTHER; note = 2'-O-methyl modified nucleotide
  modified_base 86: mod_base = OTHER; note = 2'-O-methyl modified nucleotide
  modified_base 87: mod_base = OTHER; note = 2'-O-methyl modified nucleotide
  modified_base 88: mod_base = OTHER; note = 2'-O-methyl modified nucleotide
  modified_base 89: mod_base = OTHER; note = 2'-O-methyl modified nucleotide
  modified_base 90: mod_base = OTHER; note = 2'-O-methyl modified nucleotide
  modified_base 91: mod_base = OTHER; note = 2'-O-methyl modified nucleotide
  modified_base 92: mod_base = OTHER; note = 2'-O-methyl modified nucleotide
  modified_base 93: mod_base = OTHER; note = 2'-O-methyl modified nucleotide
  modified_base 94: mod_base = OTHER; note = 2'-O-methyl modified nucleotide
  modified_base 95: mod_base = OTHER; note = 2'-O-methyl modified nucleotide
  modified_base 96: mod_base = OTHER; note = 2'-O-methyl modified nucleotide
  modified_base 112: mod_base = OTHER; note = Nucleotide with phosphorothioate linkage
  modified_base 113: mod_base = OTHER; note = 2'-O-methyl modified nucleotide with phosphorothioate linkage
  modified_base 114: mod_base = OTHER; note = 2'-O-methyl modified nucleotide with phosphorothioate linkage
  modified_base 115: mod_base = OTHER; note = 2'-O-methyl modified nucleotide
gctggtacacggcagggtcagttttagagctagaaatagcaagttaaaataaggctagtccgttatcaacttgaaaaagtggcaccgagtcggtgcatatccagaacccctgccg

SEQ ID NO: 16529 - RNA, 122 nt, synthetic construct
  source 1..122: mol_type = other RNA
  modified_base 1: mod_base = OTHER; note = 2'-O-methyl modified nucleotide with phosphorothioate linkage
  modified_base 2: mod_base = OTHER; note = 2'-O-methyl modified nucleotide with phosphorothioate linkage
  modified_base 3: mod_base = OTHER; note = 2'-O-methyl modified nucleotide with phosphorothioate linkage
  modified_base 29: mod_base = OTHER; note = 2'-O-methyl modified nucleotide
  modified_base 30: mod_base = OTHER; note = 2'-O-methyl modified nucleotide
  modified_base 31: mod_base = OTHER; note = 2'-O-methyl modified nucleotide
  modified_base 32: mod_base = OTHER; note = 2'-O-methyl modified nucleotide
  modified_base 33: mod_base = OTHER; note = 2'-O-methyl modified nucleotide
  modified_base 34: mod_base = OTHER; note = 2'-O-methyl modified nucleotide
  modified_base 35: mod_base = OTHER; note = 2'-O-methyl modified nucleotide
  modified_base 36: mod_base = OTHER; note = 2'-O-methyl modified nucleotide
  modified_base 37: mod_base = OTHER; note = 2'-O-methyl modified nucleotide
  modified_base 38: mod_base = OTHER; note = 2'-O-methyl modified nucleotide
  modified_base 39: mod_base = OTHER; note = 2'-O-methyl modified nucleotide
  modified_base 40: mod_base = OTHER; note = 2'-O-methyl modified nucleotide
  modified_base 69: mod_base = OTHER; note = 2'-O-methyl modified nucleotide
  modified_base 70: mod_base = OTHER; note = 2'-O-methyl modified nucleotide
  modified_base 71: mod_base = OTHER; note = 2'-O-methyl modified nucleotide
  modified_base 72: mod_base = OTHER; note = 2'-O-methyl modified nucleotide
  modified_base 73: mod_base = OTHER; note = 2'-O-methyl modified nucleotide
  modified_base 74: mod_base = OTHER; note = 2'-O-methyl modified nucleotide
  modified_base 75: mod_base = OTHER; note = 2'-O-methyl modified nucleotide
  modified_base 76: mod_base = OTHER; note = 2'-O-methyl modified nucleotide
  modified_base 77: mod_base = OTHER; note = 2'-O-methyl modified nucleotide
  modified_base 78: mod_base = OTHER; note = 2'-O-methyl modified nucleotide
  modified_base 79: mod_base = OTHER; note = 2'-O-methyl modified nucleotide
  modified_base 80: mod_base = OTHER; note = 2'-O-methyl modified nucleotide
  modified_base 81: mod_base = OTHER; note = 2'-O-methyl modified nucleotide
  modified_base 82: mod_base = OTHER; note = 2'-O-methyl modified nucleotide
  modified_base 83: mod_base = OTHER; note = 2'-O-methyl modified nucleotide
  modified_base 84: mod_base = OTHER; note = 2'-O-methyl modified nucleotide
  modified_base 85: mod_base = OTHER; note = 2'-O-methyl modified nucleotide
  modified_base 86: mod_base = OTHER; note = 2'-O-methyl modified nucleotide
  modified_base 87: mod_base = OTHER; note = 2'-O-methyl modified nucleotide
  modified_base 88: mod_base = OTHER; note = 2'-O-methyl modified nucleotide
  modified_base 89: mod_base = OTHER; note = 2'-O-methyl modified nucleotide
  modified_base 90: mod_base = OTHER; note = 2'-O-methyl modified nucleotide
  modified_base 91: mod_base = OTHER; note = 2'-O-methyl modified nucleotide
  modified_base 92: mod_base = OTHER; note = 2'-O-methyl modified nucleotide
  modified_base 93: mod_base = OTHER; note = 2'-O-methyl modified nucleotide
  modified_base 94: mod_base = OTHER; note = 2'-O-methyl modified nucleotide
  modified_base 95: mod_base = OTHER; note = 2'-O-methyl modified nucleotide
  modified_base 96: mod_base = OTHER; note = 2'-O-methyl modified nucleotide
  modified_base 119: mod_base = OTHER; note = Nucleotide with phosphorothioate linkage
  modified_base 120: mod_base = OTHER; note = 2'-O-methyl modified nucleotide with phosphorothioate linkage
  modified_base 121: mod_base = OTHER; note = 2'-O-methyl modified nucleotide with phosphorothioate linkage
  modified_base 122: mod_base = OTHER; note = 2'-O-methyl modified nucleotide
gctggtacacggcagggtcagttttagagctagaaatagcaagttaaaataaggctagtccgttatcaacttgaaaaagtggcaccgagtcggtgcagatatccagaacccctgccgtgtac

SEQ ID NO: 16530 - RNA, 121 nt, synthetic construct
  source 1..121: mol_type = other RNA
  modified_base 1: mod_base = OTHER; note = 2'-O-methyl modified nucleotide with phosphorothioate linkage
  modified_base 2: mod_base = OTHER; note = 2'-O-methyl modified nucleotide with phosphorothioate linkage
  modified_base 3: mod_base = OTHER; note = 2'-O-methyl modified nucleotide with phosphorothioate linkage
  modified_base 29: mod_base = OTHER; note = 2'-O-methyl modified nucleotide
  modified_base 30: mod_base = OTHER; note = 2'-O-methyl modified nucleotide
  modified_base 31: mod_base = OTHER; note = 2'-O-methyl modified nucleotide
  modified_base 32: mod_base = OTHER; note = 2'-O-methyl modified nucleotide
  modified_base 33: mod_base = OTHER; note = 2'-O-methyl modified nucleotide
  modified_base 34: mod_base = OTHER; note = 2'-O-methyl modified nucleotide
  modified_base 35: mod_base = OTHER; note = 2'-O-methyl modified nucleotide
  modified_base 36: mod_base = OTHER; note = 2'-O-methyl modified nucleotide
  modified_base 37: mod_base = OTHER; note = 2'-O-methyl modified nucleotide
  modified_base 38: mod_base = OTHER; note = 2'-O-methyl modified nucleotide
  modified_base 39: mod_base = OTHER; note = 2'-O-methyl modified nucleotide
  modified_base 40: mod_base = OTHER; note = 2'-O-methyl modified nucleotide
  modified_base 69: mod_base = OTHER; note = 2'-O-methyl modified nucleotide
  modified_base 70: mod_base = OTHER; note = 2'-O-methyl modified nucleotide
  modified_base 71: mod_base = OTHER; note = 2'-O-methyl modified nucleotide
  modified_base 72: mod_base = OTHER; note = 2'-O-methyl modified nucleotide
  modified_base 73: mod_base = OTHER; note = 2'-O-methyl modified nucleotide
  modified_base 74: mod_base = OTHER; note = 2'-O-methyl modified nucleotide
  modified_base 75: mod_base = OTHER; note = 2'-O-methyl modified nucleotide
  modified_base 76: mod_base = OTHER; note = 2'-O-methyl modified nucleotide
  modified_base 77: mod_base = OTHER; note = 2'-O-methyl modified nucleotide
  modified_base 78: mod_base = OTHER; note = 2'-O-methyl modified nucleotide
  modified_base 79: mod_base = OTHER; note = 2'-O-methyl modified nucleotide
  modified_base 80: mod_base = OTHER; note = 2'-O-methyl modified nucleotide
  modified_base 81: mod_base = OTHER; note = 2'-O-methyl modified nucleotide
  modified_base 82: mod_base = OTHER; note = 2'-O-methyl modified nucleotide
  modified_base 83: mod_base = OTHER; note = 2'-O-methyl modified nucleotide
  modified_base 84: mod_base = OTHER; note = 2'-O-methyl modified nucleotide
  modified_base 85: mod_base = OTHER; note = 2'-O-methyl modified nucleotide
  modified_base 86: mod_base = OTHER; note = 2'-O-methyl modified nucleotide
  modified_base 87: mod_base = OTHER; note = 2'-O-methyl modified nucleotide
  modified_base 88: mod_base = OTHER; note = 2'-O-methyl modified nucleotide
  modified_base 89: mod_base = OTHER; note = 2'-O-methyl modified nucleotide
  modified_base 90: mod_base = OTHER; note = 2'-O-methyl modified nucleotide
  modified_base 91: mod_base = OTHER; note = 2'-O-methyl modified nucleotide
  modified_base 92: mod_base = OTHER; note = 2'-O-methyl modified nucleotide
  modified_base 93: mod_base = OTHER; note = 2'-O-methyl modified nucleotide
  modified_base 94: mod_base = OTHER; note = 2'-O-methyl modified nucleotide
  modified_base 95: mod_base = OTHER; note = 2'-O-methyl modified nucleotide
  modified_base 96: mod_base = OTHER; note = 2'-O-methyl modified nucleotide
  modified_base 118: mod_base = OTHER; note = Nucleotide with phosphorothioate linkage
  modified_base 119: mod_base = OTHER; note = 2'-O-methyl modified nucleotide with phosphorothioate linkage
  modified_base 120: mod_base = OTHER; note = 2'-O-methyl modified nucleotide with phosphorothioate linkage
  modified_base 121: mod_base = OTHER; note = 2'-O-methyl modified nucleotide
gctggtacacggcagggtcagttttagagctagaaatagcaagttaaaataaggctagtccgttatcaacttgaaaaagtggcaccgagtcggtgcagatatccagaacccctgccgtgta

SEQ ID NO: 16531 - RNA, 120 nt, synthetic construct
  source 1..120: mol_type = other RNA
  modified_base 1: mod_base = OTHER; note = 2'-O-methyl modified nucleotide with phosphorothioate linkage
  modified_base 2: mod_base = OTHER; note = 2'-O-methyl modified nucleotide with phosphorothioate linkage
  modified_base 3: mod_base = OTHER; note = 2'-O-methyl modified nucleotide with phosphorothioate linkage
  modified_base 29: mod_base = OTHER; note = 2'-O-methyl modified nucleotide
  modified_base 30: mod_base = OTHER; note = 2'-O-methyl modified nucleotide
  modified_base 31: mod_base = OTHER; note = 2'-O-methyl modified nucleotide
  modified_base 32: mod_base = OTHER; note = 2'-O-methyl modified nucleotide
  modified_base 33: mod_base = OTHER; note = 2'-O-methyl modified nucleotide
  modified_base 34: mod_base = OTHER; note = 2'-O-methyl modified nucleotide
  modified_base 35: mod_base = OTHER; note = 2'-O-methyl modified nucleotide
  modified_base 36: mod_base = OTHER; note = 2'-O-methyl modified nucleotide
  modified_base 37: mod_base = OTHER; note = 2'-O-methyl modified nucleotide
  modified_base 38: mod_base = OTHER; note = 2'-O-methyl modified nucleotide
  modified_base 39: mod_base = OTHER; note = 2'-O-methyl modified nucleotide
  modified_base 40: mod_base = OTHER; note = 2'-O-methyl modified nucleotide
  modified_base 69: mod_base = OTHER; note = 2'-O-methyl modified nucleotide
  modified_base 70: mod_base = OTHER; note = 2'-O-methyl modified nucleotide
  modified_base 71: mod_base = OTHER; note = 2'-O-methyl modified nucleotide
  modified_base 72: mod_base = OTHER; note = 2'-O-methyl modified nucleotide
  modified_base 73: mod_base = OTHER; note = 2'-O-methyl modified nucleotide
  modified_base 74: mod_base = OTHER; note = 2'-O-methyl modified nucleotide
  modified_base 75: mod_base = OTHER; note = 2'-O-methyl modified nucleotide
  modified_base 76: mod_base = OTHER; note = 2'-O-methyl modified nucleotide
  modified_base 77: mod_base = OTHER; note = 2'-O-methyl modified nucleotide
  modified_base 78: mod_base = OTHER; note = 2'-O-methyl modified nucleotide
  modified_base 79: mod_base = OTHER; note = 2'-O-methyl modified nucleotide
  modified_base 80: mod_base = OTHER; note = 2'-O-methyl modified nucleotide
  modified_base 81: mod_base = OTHER; note = 2'-O-methyl modified nucleotide
  modified_base 82: mod_base = OTHER; note = 2'-O-methyl modified nucleotide
  modified_base 83: mod_base = OTHER; note = 2'-O-methyl modified nucleotide
  modified_base 84: mod_base = OTHER; note = 2'-O-methyl modified nucleotide
  modified_base 85: mod_base = OTHER; note = 2'-O-methyl modified nucleotide
  modified_base 86: mod_base = OTHER; note = 2'-O-methyl modified nucleotide
  modified_base 87: mod_base = OTHER; note = 2'-O-methyl modified nucleotide
  modified_base 88: mod_base = OTHER; note = 2'-O-methyl modified nucleotide
  modified_base 89: mod_base = OTHER; note = 2'-O-methyl modified nucleotide
  modified_base 90: mod_base = OTHER; note = 2'-O-methyl modified nucleotide
  modified_base 91: mod_base = OTHER; note = 2'-O-methyl modified nucleotide
  modified_base 92: mod_base = OTHER; note = 2'-O-methyl modified nucleotide
  modified_base 93: mod_base = OTHER; note = 2'-O-methyl modified nucleotide
  modified_base 94: mod_base = OTHER; note = 2'-O-methyl modified nucleotide
  modified_base 95: mod_base = OTHER; note = 2'-O-methyl modified nucleotide
  modified_base 96: mod_base = OTHER; note = 2'-O-methyl modified nucleotide
  modified_base 117: mod_base = OTHER; note = Nucleotide with phosphorothioate linkage
  modified_base 118: mod_base = OTHER; note = 2'-O-methyl modified nucleotide with phosphorothioate linkage
  modified_base 119: mod_base = OTHER; note = 2'-O-methyl modified nucleotide with phosphorothioate linkage
  modified_base 120: mod_base = OTHER; note = 2'-O-methyl modified nucleotide
gctggtacacggcagggtcagttttagagctagaaatagcaagttaaaataaggctagtccgttatcaacttgaaaaagtggcaccgagtcggtgcagatatccagaacccctgccgtgt

SEQ ID NO: 16532 - RNA, 119 nt, synthetic construct
  source 1..119: mol_type = other RNA
  modified_base 1: mod_base = OTHER; note = 2'-O-methyl modified nucleotide with phosphorothioate linkage
  modified_base 2: mod_base = OTHER; note = 2'-O-methyl modified nucleotide with phosphorothioate linkage
  modified_base 3: mod_base = OTHER; note = 2'-O-methyl modified nucleotide with phosphorothioate linkage
  modified_base 29: mod_base = OTHER; note = 2'-O-methyl modified nucleotide
  modified_base 30: mod_base = OTHER; note = 2'-O-methyl modified nucleotide
  modified_base 31: mod_base = OTHER; note = 2'-O-methyl modified nucleotide
  modified_base 32: mod_base = OTHER; note = 2'-O-methyl modified nucleotide
  modified_base 33: mod_base = OTHER; note = 2'-O-methyl modified nucleotide
  modified_base 34: mod_base = OTHER; note = 2'-O-methyl modified nucleotide
  modified_base 35: mod_base = OTHER; note = 2'-O-methyl modified nucleotide
  modified_base 36: mod_base = OTHER; note = 2'-O-methyl modified nucleotide
  modified_base 37: mod_base = OTHER; note = 2'-O-methyl modified nucleotide
  modified_base 38: mod_base = OTHER; note = 2'-O-methyl modified nucleotide
  modified_base 39: mod_base = OTHER; note = 2'-O-methyl modified nucleotide
  modified_base 40: mod_base = OTHER; note = 2'-O-methyl modified nucleotide
  modified_base 69: mod_base = OTHER; note = 2'-O-methyl modified nucleotide
  modified_base 70: mod_base = OTHER; note = 2'-O-methyl modified nucleotide
  modified_base 71: mod_base = OTHER; note = 2'-O-methyl modified nucleotide
  modified_base 72: mod_base = OTHER; note = 2'-O-methyl modified nucleotide
  modified_base 73: mod_base = OTHER; note = 2'-O-methyl modified nucleotide
  modified_base 74: mod_base = OTHER; note = 2'-O-methyl modified nucleotide
  modified_base 75: mod_base = OTHER; note = 2'-O-methyl modified nucleotide
  modified_base 76: mod_base = OTHER; note = 2'-O-methyl modified nucleotide
  modified_base 77: mod_base = OTHER; note = 2'-O-methyl modified nucleotide
  modified_base 78: mod_base = OTHER; note = 2'-O-methyl modified nucleotide
  modified_base 79: mod_base = OTHER; note = 2'-O-methyl modified nucleotide
  modified_base 80: mod_base = OTHER; note = 2'-O-methyl modified nucleotide
  modified_base 81: mod_base = OTHER; note = 2'-O-methyl modified nucleotide
  modified_base 82: mod_base = OTHER; note = 2'-O-methyl modified nucleotide
  modified_base 83: mod_base = OTHER; note = 2'-O-methyl modified nucleotide
  modified_base 84: mod_base = OTHER; note = 2'-O-methyl modified nucleotide
  modified_base 85: mod_base = OTHER; note = 2'-O-methyl modified nucleotide
  modified_base 86: mod_base = OTHER; note = 2'-O-methyl modified nucleotide
  modified_base 87: mod_base = OTHER; note = 2'-O-methyl modified nucleotide
  modified_base 88: mod_base = OTHER; note = 2'-O-methyl modified nucleotide
  modified_base 89: mod_base = OTHER; note = 2'-O-methyl modified nucleotide
  modified_base 90: mod_base = OTHER; note = 2'-O-methyl modified nucleotide
  modified_base 91: mod_base = OTHER; note = 2'-O-methyl modified nucleotide
  modified_base 92: mod_base = OTHER; note = 2'-O-methyl modified nucleotide
  modified_base 93: mod_base = OTHER; note = 2'-O-methyl modified nucleotide
  modified_base 94: mod_base = OTHER; note = 2'-O-methyl modified nucleotide
  modified_base 95: mod_base = OTHER; note = 2'-O-methyl modified nucleotide
  modified_base 96: mod_base = OTHER; note = 2'-O-methyl modified nucleotide
  modified_base 116: mod_base = OTHER; note = Nucleotide with phosphorothioate linkage
  modified_base 117: mod_base = OTHER; note = 2'-O-methyl modified nucleotide with phosphorothioate linkage
  modified_base 118: mod_base = OTHER; note = 2'-O-methyl modified nucleotide with phosphorothioate linkage
  modified_base 119: mod_base = OTHER; note = 2'-O-methyl modified nucleotide
gctggtacacggcagggtcagttttagagctagaaatagcaagttaaaataaggctagtccgttatcaacttgaaaaagtggcaccgagtcggtgcagatatccagaacccctgccgtg

SEQ ID NO: 16533 - RNA, 118 nt, synthetic construct
  source 1..118: mol_type = other RNA
  modified_base 1: mod_base = OTHER; note = 2'-O-methyl modified nucleotide with phosphorothioate linkage
  modified_base 2: mod_base = OTHER; note = 2'-O-methyl modified nucleotide with phosphorothioate linkage
  modified_base 3: mod_base = OTHER; note = 2'-O-methyl modified nucleotide with phosphorothioate linkage
  modified_base 29: mod_base = OTHER; note = 2'-O-methyl modified nucleotide
  modified_base 30: mod_base = OTHER; note = 2'-O-methyl modified nucleotide
  modified_base 31: mod_base = OTHER; note = 2'-O-methyl modified nucleotide
  modified_base 32: mod_base = OTHER; note = 2'-O-methyl modified nucleotide
  modified_base 33: mod_base = OTHER; note = 2'-O-methyl modified nucleotide
  modified_base 34: mod_base = OTHER; note = 2'-O-methyl modified nucleotide
  modified_base 35: mod_base = OTHER; note = 2'-O-methyl modified nucleotide
  modified_base 36: mod_base = OTHER; note = 2'-O-methyl modified nucleotide
  modified_base 37: mod_base = OTHER; note = 2'-O-methyl modified nucleotide
  modified_base 38: mod_base = OTHER; note = 2'-O-methyl modified nucleotide
  modified_base 39: mod_base = OTHER; note = 2'-O-methyl modified nucleotide
  modified_base 40: mod_base = OTHER; note = 2'-O-methyl modified nucleotide
  modified_base 69: mod_base = OTHER; note = 2'-O-methyl modified nucleotide
  modified_base 70: mod_base = OTHER; note = 2'-O-methyl modified nucleotide
  modified_base 71: mod_base = OTHER; note = 2'-O-methyl modified nucleotide
  modified_base 72: mod_base = OTHER; note = 2'-O-methyl modified nucleotide
  modified_base 73: mod_base = OTHER; note = 2'-O-methyl modified nucleotide
  modified_base 74: mod_base = OTHER; note = 2'-O-methyl modified nucleotide
  modified_base 75: mod_base = OTHER; note = 2'-O-methyl modified nucleotide
  modified_base 76: mod_base = OTHER; note = 2'-O-methyl modified nucleotide
  modified_base 77: mod_base = OTHER; note = 2'-O-methyl modified nucleotide
  modified_base 78: mod_base = OTHER; note = 2'-O-methyl modified nucleotide
  modified_base 79: mod_base = OTHER; note = 2'-O-methyl modified nucleotide
  modified_base 80: mod_base = OTHER; note = 2'-O-methyl modified nucleotide
  modified_base 81: mod_base = OTHER; note = 2'-O-methyl modified nucleotide
  modified_base 82: mod_base = OTHER; note = 2'-O-methyl modified nucleotide
  modified_base 83: mod_base = OTHER; note = 2'-O-methyl modified nucleotide
  modified_base 84: mod_base = OTHER; note = 2'-O-methyl modified nucleotide
  modified_base 85: mod_base = OTHER; note = 2'-O-methyl modified nucleotide
  modified_base 86: mod_base = OTHER; note = 2'-O-methyl modified nucleotide
  modified_base 87: mod_base = OTHER; note = 2'-O-methyl modified nucleotide
  modified_base 88: mod_base = OTHER; note = 2'-O-methyl modified nucleotide
  modified_base 89: mod_base = OTHER; note = 2'-O-methyl modified nucleotide
  modified_base 90: mod_base = OTHER; note = 2'-O-methyl modified nucleotide
  modified_base 91: mod_base = OTHER; note = 2'-O-methyl modified nucleotide
  modified_base 92: mod_base = OTHER; note = 2'-O-methyl modified nucleotide
  modified_base 93: mod_base = OTHER; note = 2'-O-methyl modified nucleotide
  modified_base 94: mod_base = OTHER; note = 2'-O-methyl modified nucleotide
  modified_base 95: mod_base = OTHER; note = 2'-O-methyl modified nucleotide
  modified_base 96: mod_base = OTHER; note = 2'-O-methyl modified nucleotide
  modified_base 115: mod_base = OTHER; note = Nucleotide with phosphorothioate linkage
  modified_base 116: mod_base = OTHER; note = 2'-O-methyl modified nucleotide with phosphorothioate linkage
  modified_base 117: mod_base = OTHER; note = 2'-O-methyl modified nucleotide with phosphorothioate linkage
  modified_base 118: mod_base = OTHER; note = 2'-O-methyl modified nucleotide
gctggtacacggcagggtcagttttagagctagaaatagcaagttaaaataaggctagtccgttatcaacttgaaaaagtggcaccgagtcggtgcagatatccagaacccctgccgt

SEQ ID NO: 16534 - RNA, 117 nt, synthetic construct
  source 1..117: mol_type = other RNA
  modified_base 1: mod_base = OTHER; note = 2'-O-methyl modified nucleotide with phosphorothioate linkage
  modified_base 2: mod_base = OTHER; note = 2'-O-methyl modified nucleotide with phosphorothioate linkage
  modified_base 3: mod_base = OTHER; note = 2'-O-methyl modified nucleotide with phosphorothioate linkage
  modified_base 29: mod_base = OTHER; note = 2'-O-methyl modified nucleotide
  modified_base 30: mod_base = OTHER; note = 2'-O-methyl modified nucleotide
  modified_base 31: mod_base = OTHER; note = 2'-O-methyl modified nucleotide
  modified_base 32: mod_base = OTHER; note = 2'-O-methyl modified nucleotide
  modified_base 33: mod_base = OTHER; note = 2'-O-methyl modified nucleotide
  modified_base 34: mod_base = OTHER; note = 2'-O-methyl modified nucleotide
  modified_base 35: mod_base = OTHER; note = 2'-O-methyl modified nucleotide
  modified_base 36: mod_base = OTHER; note = 2'-O-methyl modified nucleotide
  modified_base 37: mod_base = OTHER; note = 2'-O-methyl modified nucleotide
  modified_base 38: mod_base = OTHER; note = 2'-O-methyl modified nucleotide
  modified_base 39: mod_base = OTHER; note = 2'-O-methyl modified nucleotide
  modified_base 40: mod_base = OTHER; note = 2'-O-methyl modified nucleotide
  modified_base 69: mod_base = OTHER; note = 2'-O-methyl modified nucleotide
  modified_base 70: mod_base = OTHER; note = 2'-O-methyl modified nucleotide
  modified_base 71: mod_base = OTHER; note = 2'-O-methyl modified nucleotide
  modified_base 72: mod_base = OTHER; note = 2'-O-methyl modified nucleotide
  modified_base 73: mod_base = OTHER; note = 2'-O-methyl modified nucleotide
  modified_base 74: mod_base = OTHER; note = 2'-O-methyl modified nucleotide
  modified_base 75: mod_base = OTHER; note = 2'-O-methyl modified nucleotide
  modified_base 76: mod_base = OTHER; note = 2'-O-methyl modified nucleotide
  modified_base 77: mod_base = OTHER; note = 2'-O-methyl modified nucleotide
  modified_base 78: mod_base = OTHER; note = 2'-O-methyl modified nucleotide
  modified_base 79: mod_base = OTHER; note = 2'-O-methyl modified nucleotide
  modified_base 80: mod_base = OTHER; note = 2'-O-methyl modified nucleotide
  modified_base 81: mod_base = OTHER; note = 2'-O-methyl modified nucleotide
  modified_base 82: mod_base = OTHER; note = 2'-O-methyl modified nucleotide
  modified_base 83: mod_base = OTHER; note = 2'-O-methyl modified nucleotide
  modified_base 84: mod_base = OTHER; note = 2'-O-methyl modified nucleotide
  modified_base 85: mod_base = OTHER; note = 2'-O-methyl modified nucleotide
  modified_base 86: mod_base = OTHER; note = 2'-O-methyl modified nucleotide
  modified_base 87: mod_base = OTHER; note = 2'-O-methyl modified nucleotide
  modified_base 88: mod_base = OTHER; note = 2'-O-methyl modified nucleotide
  modified_base 89: mod_base = OTHER; note = 2'-O-methyl modified nucleotide
  modified_base 90: mod_base = OTHER; note = 2'-O-methyl modified nucleotide
  modified_base 91: mod_base = OTHER; note = 2'-O-methyl modified nucleotide
  modified_base 92: mod_base = OTHER; note = 2'-O-methyl modified nucleotide
  modified_base 93: mod_base = OTHER; note = 2'-O-methyl modified nucleotide
  modified_base 94: mod_base = OTHER; note = 2'-O-methyl modified nucleotide
  modified_base 95: mod_base = OTHER; note = 2'-O-methyl modified nucleotide
  modified_base 96: mod_base = OTHER; note = 2'-O-methyl modified nucleotide
  modified_base 114: mod_base = OTHER; note = Nucleotide with phosphorothioate linkage
  modified_base 115: mod_base = OTHER; note = 2'-O-methyl modified nucleotide with phosphorothioate linkage
  modified_base 116: mod_base = OTHER; note = 2'-O-methyl modified nucleotide with phosphorothioate linkage
  modified_base 117: mod_base = OTHER; note = 2'-O-methyl modified nucleotide
gctggtacacggcagggtcagttttagagctagaaatagcaagttaaaataaggctagtccgttatcaacttgaaaaagtggcaccgagtcggtgcagatatccagaacccctgccg

SEQ ID NO: 16535 - RNA, 124 nt, synthetic construct
  source 1..124: mol_type = other RNA
  modified_base 1: mod_base = OTHER; note = 2'-O-methyl modified nucleotide with phosphorothioate linkage
  modified_base 2: mod_base = OTHER; note = 2'-O-methyl modified nucleotide with phosphorothioate linkage
  modified_base 3: mod_base = OTHER; note = 2'-O-methyl modified nucleotide with phosphorothioate linkage
  modified_base 29: mod_base = OTHER; note = 2'-O-methyl modified nucleotide
  modified_base 30: mod_base = OTHER; note = 2'-O-methyl modified nucleotide
  modified_base 31: mod_base = OTHER; note = 2'-O-methyl modified nucleotide
  modified_base 32: mod_base = OTHER; note = 2'-O-methyl modified nucleotide
  modified_base 33: mod_base = OTHER; note = 2'-O-methyl modified nucleotide
  modified_base 34: mod_base = OTHER; note = 2'-O-methyl modified nucleotide
  modified_base 35: mod_base = OTHER; note = 2'-O-methyl modified nucleotide
  modified_base 36: mod_base = OTHER; note = 2'-O-methyl modified nucleotide
  modified_base 37: mod_base = OTHER; note = 2'-O-methyl modified nucleotide
  modified_base 38: mod_base = OTHER; note = 2'-O-methyl modified nucleotide
  modified_base 39: mod_base = OTHER; note = 2'-O-methyl modified nucleotide
  modified_base 40: mod_base = OTHER; note = 2'-O-methyl modified nucleotide
  modified_base 69: mod_base = OTHER; note = 2'-O-methyl modified nucleotide
  modified_base 70: mod_base = OTHER; note = 2'-O-methyl modified nucleotide
  modified_base 71: mod_base = OTHER; note = 2'-O-methyl modified nucleotide
  modified_base 72: mod_base = OTHER; note = 2'-O-methyl modified nucleotide
  modified_base 73: mod_base = OTHER; note = 2'-O-methyl modified nucleotide
  modified_base 74: mod_base = OTHER; note = 2'-O-methyl modified nucleotide
  modified_base 75: mod_base = OTHER; note = 2'-O-methyl modified nucleotide
  modified_base 76: mod_base = OTHER; note = 2'-O-methyl modified nucleotide
  modified_base 77: mod_base = OTHER; note = 2'-O-methyl modified nucleotide
  modified_base 78: mod_base = OTHER; note = 2'-O-methyl modified nucleotide
  modified_base 79: mod_base = OTHER; note = 2'-O-methyl modified nucleotide
  modified_base 80: mod_base = OTHER; note = 2'-O-methyl modified nucleotide
  modified_base 81: mod_base = OTHER; note = 2'-O-methyl modified nucleotide
  modified_base 82: mod_base = OTHER; note = 2'-O-methyl modified nucleotide
  modified_base 83: mod_base = OTHER; note = 2'-O-methyl modified nucleotide
  modified_base 84: mod_base = OTHER; note = 2'-O-methyl modified nucleotide
  modified_base 85: mod_base = OTHER; note = 2'-O-methyl modified nucleotide
  modified_base 86: mod_base = OTHER; note = 2'-O-methyl modified nucleotide
  modified_base 87: mod_base = OTHER; note = 2'-O-methyl modified nucleotide
  modified_base 88: mod_base = OTHER; note = 2'-O-methyl modified nucleotide
  modified_base 89: mod_base = OTHER; note = 2'-O-methyl modified nucleotide
  modified_base 90: mod_base = OTHER; note = 2'-O-methyl modified nucleotide
  modified_base 91: mod_base = OTHER; note = 2'-O-methyl modified nucleotide
  modified_base 92: mod_base = OTHER; note = 2'-O-methyl modified nucleotide
  modified_base 93: mod_base = OTHER; note = 2'-O-methyl modified nucleotide
  modified_base 94: mod_base = OTHER; note = 2'-O-methyl modified nucleotide
  modified_base 95: mod_base = OTHER; note = 2'-O-methyl modified nucleotide
  modified_base 96: mod_base = OTHER; note = 2'-O-methyl modified nucleotide
  modified_base 121: mod_base = OTHER; note = Nucleotide with phosphorothioate linkage
  modified_base 122: mod_base = OTHER; note = 2'-O-methyl modified nucleotide with phosphorothioate linkage
  modified_base 123: mod_base = OTHER; note = 2'-O-methyl modified nucleotide with phosphorothioate linkage
  modified_base 124: mod_base = OTHER; note = 2'-O-methyl modified nucleotide
gctggtacacggcagggtcagttttagagctagaaatagcaagttaaaataaggctagtccgttatcaacttgaaaaagtggcaccgagtcggtgcacagatatccagaacccctgccgtgtac

SEQ ID NO: 16536 - RNA, 123 nt, synthetic construct
  source 1..123: mol_type = other RNA
  modified_base 1: mod_base = OTHER; note = 2'-O-methyl modified nucleotide with phosphorothioate linkage
  modified_base 2: mod_base = OTHER; note = 2'-O-methyl modified nucleotide with phosphorothioate linkage
  modified_base 3: mod_base = OTHER; note = 2'-O-methyl modified nucleotide with phosphorothioate linkage
  modified_base 29: mod_base = OTHER; note = 2'-O-methyl modified nucleotide
  modified_base 30: mod_base = OTHER; note = 2'-O-methyl modified nucleotide
  modified_base 31: mod_base = OTHER; note = 2'-O-methyl modified nucleotide
  modified_base 32: mod_base = OTHER; note = 2'-O-methyl modified nucleotide
  modified_base 33: mod_base = OTHER; note = 2'-O-methyl modified nucleotide
  modified_base 34: mod_base = OTHER; note = 2'-O-methyl modified nucleotide
  modified_base 35: mod_base = OTHER; note = 2'-O-methyl modified nucleotide
  modified_base 36: mod_base = OTHER; note = 2'-O-methyl modified nucleotide
  modified_base 37: mod_base = OTHER; note = 2'-O-methyl modified nucleotide
  modified_base 38: mod_base = OTHER; note = 2'-O-methyl modified nucleotide
  modified_base 39: mod_base = OTHER; note = 2'-O-methyl modified nucleotide
  modified_base 40: mod_base = OTHER; note = 2'-O-methyl modified nucleotide
  modified_base 69: mod_base = OTHER; note = 2'-O-methyl modified nucleotide
  modified_base 70: mod_base = OTHER; note = 2'-O-methyl modified nucleotide
  modified_base 71: mod_base = OTHER; note = 2'-O-methyl modified nucleotide
  modified_base 72: mod_base = OTHER; note = 2'-O-methyl modified nucleotide
  modified_base 73: mod_base = OTHER; note = 2'-O-methyl modified nucleotide
  modified_base 74: mod_base = OTHER; note = 2'-O-methyl modified nucleotide
  modified_base 75: mod_base = OTHER; note = 2'-O-methyl modified nucleotide
  modified_base 76: mod_base = OTHER; note = 2'-O-methyl modified nucleotide
  modified_base 77: mod_base = OTHER; note = 2'-O-methyl modified nucleotide
  modified_base 78: mod_base = OTHER; note = 2'-O-methyl modified nucleotide
  modified_base 79: mod_base = OTHER; note = 2'-O-methyl modified nucleotide
  modified_base 80: mod_base = OTHER; note = 2'-O-methyl modified nucleotide
  modified_base 81: mod_base = OTHER; note = 2'-O-methyl modified nucleotide
  modified_base 82: mod_base = OTHER; note = 2'-O-methyl modified nucleotide
  modified_base 83: mod_base = OTHER; note = 2'-O-methyl modified nucleotide
  modified_base 84: mod_base = OTHER; note = 2'-O-methyl modified nucleotide
  modified_base 85: mod_base = OTHER; note = 2'-O-methyl modified nucleotide
  modified_base 86: mod_base = OTHER; note = 2'-O-methyl modified nucleotide
  modified_base 87: mod_base = OTHER; note = 2'-O-methyl modified nucleotide
  modified_base 88: mod_base = OTHER; note = 2'-O-methyl modified nucleotide
  modified_base 89: mod_base = OTHER; note = 2'-O-methyl modified nucleotide
  modified_base 90: mod_base = OTHER; note = 2'-O-methyl modified nucleotide
  modified_base 91: mod_base = OTHER; note = 2'-O-methyl modified nucleotide
  modified_base 92: mod_base = OTHER; note = 2'-O-methyl modified nucleotide
  modified_base 93: mod_base = OTHER; note = 2'-O-methyl modified nucleotide
  modified_base 94: mod_base = OTHER; note = 2'-O-methyl modified nucleotide
  modified_base 95: mod_base = OTHER; note = 2'-O-methyl modified nucleotide
  modified_base 96: mod_base = OTHER; note = 2'-O-methyl modified nucleotide
  modified_base 120: mod_base = OTHER; note = Nucleotide with phosphorothioate linkage
  modified_base 121: mod_base = OTHER; note = 2'-O-methyl modified nucleotide with phosphorothioate linkage
  modified_base 122: mod_base = OTHER; note = 2'-O-methyl modified nucleotide with phosphorothioate linkage
  modified_base 123: mod_base = OTHER; note = 2'-O-methyl modified nucleotide
gctggtacacggcagggtcagttttagagctagaaatagcaagttaaaataaggctagtccgttatcaacttgaaaaagtggcaccgagtcggtgcacagatatccagaacccctgccgtgta

SEQ ID NO: 16537 - RNA, 122 nt, synthetic construct
  source 1..122: mol_type = other RNA
  modified_base 1: mod_base = OTHER; note = 2'-O-methyl modified nucleotide with phosphorothioate linkage
  modified_base 2: mod_base = OTHER; note = 2'-O-methyl modified nucleotide with phosphorothioate linkage
  modified_base 3: mod_base = OTHER; note = 2'-O-methyl modified nucleotide with phosphorothioate linkage
  modified_base 29: mod_base = OTHER; note = 2'-O-methyl modified nucleotide
  modified_base 30: mod_base = OTHER; note = 2'-O-methyl modified nucleotide
  modified_base 31: mod_base = OTHER; note = 2'-O-methyl modified nucleotide
  modified_base 32: mod_base = OTHER; note = 2'-O-methyl modified nucleotide
  modified_base 33: mod_base = OTHER; note = 2'-O-methyl modified nucleotide
  modified_base 34: mod_base = OTHER; note = 2'-O-methyl modified nucleotide
  modified_base 35: mod_base = OTHER; note = 2'-O-methyl modified nucleotide
  modified_base 36: mod_base = OTHER; note = 2'-O-methyl modified nucleotide
  modified_base 37: mod_base = OTHER; note = 2'-O-methyl modified nucleotide
  modified_base 38: mod_base = OTHER; note = 2'-O-methyl modified nucleotide
  modified_base 39: mod_base = OTHER; note = 2'-O-methyl modified nucleotide
  modified_base 40: mod_base = OTHER; note = 2'-O-methyl modified nucleotide
  modified_base 69: mod_base = OTHER; note = 2'-O-methyl modified nucleotide
  modified_base 70: mod_base = OTHER; note = 2'-O-methyl modified nucleotide
  modified_base 71: mod_base = OTHER; note = 2'-O-methyl modified nucleotide
  modified_base 72: mod_base = OTHER; note = 2'-O-methyl modified nucleotide
  modified_base 73: mod_base = OTHER; note = 2'-O-methyl modified nucleotide
  modified_base 74: mod_base = OTHER; note = 2'-O-methyl modified nucleotide
  modified_base 75: mod_base = OTHER; note = 2'-O-methyl modified nucleotide
  modified_base 76: mod_base = OTHER; note = 2'-O-methyl modified nucleotide
  modified_base 77: mod_base = OTHER; note = 2'-O-methyl modified nucleotide
  modified_base 78: mod_base = OTHER; note = 2'-O-methyl modified nucleotide
  modified_base 79: mod_base = OTHER; note = 2'-O-methyl modified nucleotide
  modified_base 80: mod_base = OTHER; note = 2'-O-methyl modified nucleotide
  modified_base 81: mod_base = OTHER; note = 2'-O-methyl modified nucleotide
  modified_base 82: mod_base = OTHER; note = 2'-O-methyl modified nucleotide
  modified_base 83: mod_base = OTHER; note = 2'-O-methyl modified nucleotide
  modified_base 84: mod_base = OTHER; note = 2'-O-methyl modified nucleotide
  modified_base 85: mod_base = OTHER; note = 2'-O-methyl modified nucleotide
  modified_base 86: mod_base = OTHER; note = 2'-O-methyl modified nucleotide
  modified_base 87: mod_base = OTHER; note = 2'-O-methyl modified nucleotide
  modified_base 88: mod_base = OTHER; note = 2'-O-methyl modified nucleotide
  modified_base 89: mod_base = OTHER; note = 2'-O-methyl modified nucleotide
  modified_base 90: mod_base = OTHER; note = 2'-O-methyl modified nucleotide
  modified_base 91: mod_base = OTHER; note = 2'-O-methyl modified nucleotide
  modified_base 92: mod_base = OTHER; note = 2'-O-methyl modified nucleotide
  modified_base 93: mod_base = OTHER; note = 2'-O-methyl modified nucleotide
  modified_base 94: mod_base = OTHER; note = 2'-O-methyl modified nucleotide
  modified_base 95: mod_base = OTHER; note = 2'-O-methyl modified nucleotide
  modified_base 96: mod_base = OTHER; note = 2'-O-methyl modified nucleotide
  modified_base 119: mod_base = OTHER; note = Nucleotide with phosphorothioate linkage
  modified_base 120: mod_base = OTHER; note = 2'-O-methyl modified nucleotide with phosphorothioate linkage
  modified_base 121: mod_base = OTHER; note = 2'-O-methyl modified nucleotide with phosphorothioate linkage
  modified_base 122: mod_base = OTHER; note = 2'-O-methyl modified nucleotide
gctggtacacggcagggtcagttttagagctagaaatagcaagttaaaataaggctagtccgttatcaacttgaaaaagtggcaccgagtcggtgcacagatatccagaacccctgccgtgt

SEQ ID NO: 16538 - RNA, 121 nt, synthetic construct
  source 1..121: mol_type = other RNA
  modified_base 1: mod_base = OTHER; note = 2'-O-methyl modified nucleotide with phosphorothioate linkage
  modified_base 2: mod_base = OTHER; note = 2'-O-methyl modified nucleotide with phosphorothioate linkage
  modified_base 3: mod_base = OTHER; note = 2'-O-methyl modified nucleotide with phosphorothioate linkage
  modified_base 29: mod_base = OTHER; note = 2'-O-methyl modified nucleotide
  modified_base 30: mod_base = OTHER; note = 2'-O-methyl modified nucleotide
  modified_base 31: mod_base = OTHER; note = 2'-O-methyl modified nucleotide
  modified_base 32: mod_base = OTHER; note = 2'-O-methyl modified nucleotide
  modified_base 33: mod_base = OTHER; note = 2'-O-methyl modified nucleotide
  modified_base 34: mod_base = OTHER; note = 2'-O-methyl modified nucleotide
  modified_base 35: mod_base = OTHER; note = 2'-O-methyl modified nucleotide
  modified_base 36: mod_base = OTHER; note = 2'-O-methyl modified nucleotide
  modified_base 37: mod_base = OTHER; note = 2'-O-methyl modified nucleotide
  modified_base 38: mod_base = OTHER; note = 2'-O-methyl modified nucleotide
  modified_base 39: mod_base = OTHER; note = 2'-O-methyl modified nucleotide
  modified_base 40: mod_base = OTHER; note = 2'-O-methyl modified nucleotide
  modified_base 69: mod_base = OTHER; note = 2'-O-methyl modified nucleotide
  modified_base 70: mod_base = OTHER; note = 2'-O-methyl modified nucleotide
  modified_base 71: mod_base = OTHER; note = 2'-O-methyl modified nucleotide
  modified_base 72: mod_base = OTHER; note = 2'-O-methyl modified nucleotide
  modified_base 73: mod_base = OTHER; note = 2'-O-methyl modified nucleotide
  modified_base 74: mod_base = OTHER; note = 2'-O-methyl modified nucleotide
  modified_base 75: mod_base = OTHER; note = 2'-O-methyl modified nucleotide
  modified_base 76: mod_base = OTHER; note = 2'-O-methyl modified nucleotide
  modified_base 77: mod_base = OTHER; note = 2'-O-methyl modified nucleotide
  modified_base 78: mod_base = OTHER; note = 2'-O-methyl modified nucleotide
  modified_base 79: mod_base = OTHER; note = 2'-O-methyl modified nucleotide
  modified_base 80: mod_base = OTHER; note = 2'-O-methyl modified nucleotide
  modified_base 81: mod_base = OTHER; note = 2'-O-methyl modified nucleotide
  modified_base 82: mod_base = OTHER; note = 2'-O-methyl modified nucleotide
  modified_base 83: mod_base = OTHER; note = 2'-O-methyl modified nucleotide
  modified_base 84: mod_base = OTHER; note = 2'-O-methyl modified nucleotide
  modified_base 85: mod_base = OTHER; note = 2'-O-methyl modified nucleotide
  modified_base 86: mod_base = OTHER; note = 2'-O-methyl modified nucleotide
  modified_base 87: mod_base = OTHER; note = 2'-O-methyl modified nucleotide
  modified_base 88: mod_base = OTHER; note = 2'-O-methyl modified nucleotide
  modified_base 89: mod_base = OTHER; note = 2'-O-methyl modified nucleotide
  modified_base 90: mod_base = OTHER; note = 2'-O-methyl modified nucleotide
  modified_base 91: mod_base = OTHER; note = 2'-O-methyl modified nucleotide
  modified_base 92: mod_base = OTHER; note = 2'-O-methyl modified nucleotide
  modified_base 93: mod_base = OTHER; note = 2'-O-methyl modified nucleotide
  modified_base 94: mod_base = OTHER; note = 2'-O-methyl modified nucleotide
  modified_base 95: mod_base = OTHER; note = 2'-O-methyl modified nucleotide
  modified_base 96: mod_base = OTHER; note = 2'-O-methyl modified nucleotide
  modified_base 118: mod_base = OTHER; note = Nucleotide with phosphorothioate linkage
  modified_base 119: mod_base = OTHER; note = 2'-O-methyl modified nucleotide with phosphorothioate linkage
  modified_base 120: mod_base = OTHER; note = 2'-O-methyl modified nucleotide with phosphorothioate linkage
  modified_base 121: mod_base = OTHER; note = 2'-O-methyl modified nucleotide
gctggtacacggcagggtcagttttagagctagaaatagcaagttaaaataaggctagtccgttatcaacttgaaaaagtggcaccgagtcggtgcacagatatccagaacccctgccgtg

SEQ ID NO: 16539 - RNA, 120 nt, synthetic construct
  source 1..120: mol_type = other RNA
  modified_base 1: mod_base = OTHER; note = 2'-O-methyl modified nucleotide with phosphorothioate linkage
  modified_base 2: mod_base = OTHER; note = 2'-O-methyl modified nucleotide with phosphorothioate linkage
  modified_base 3: mod_base = OTHER; note = 2'-O-methyl modified nucleotide with phosphorothioate linkage
  modified_base 29: mod_base = OTHER; note = 2'-O-methyl modified nucleotide
  modified_base 30: mod_base = OTHER; note = 2'-O-methyl modified nucleotide
  modified_base 31: mod_base = OTHER; note = 2'-O-methyl modified nucleotide
  modified_base 32: mod_base = OTHER; note = 2'-O-methyl modified nucleotide
  modified_base 33: mod_base = OTHER; note = 2'-O-methyl modified nucleotide
  modified_base 34: mod_base = OTHER; note = 2'-O-methyl modified nucleotide
  modified_base 35: mod_base = OTHER; note = 2'-O-methyl modified nucleotide
  modified_base 36: mod_base = OTHER; note = 2'-O-methyl modified nucleotide
  modified_base 37: mod_base = OTHER; note = 2'-O-methyl modified nucleotide
  modified_base 38: mod_base = OTHER; note = 2'-O-methyl modified nucleotide
  modified_base 39: mod_base = OTHER; note = 2'-O-methyl modified nucleotide
  modified_base 40: mod_base = OTHER; note = 2'-O-methyl modified nucleotide
  modified_base 69: mod_base = OTHER; note = 2'-O-methyl modified nucleotide
  modified_base 70: mod_base = OTHER; note = 2'-O-methyl modified nucleotide
  modified_base 71: mod_base = OTHER; note = 2'-O-methyl modified nucleotide
  modified_base 72: mod_base = OTHER; note = 2'-O-methyl modified nucleotide
  modified_base 73: mod_base = OTHER; note = 2'-O-methyl modified nucleotide
  modified_base 74: mod_base = OTHER; note = 2'-O-methyl modified nucleotide
  modified_base 75: mod_base = OTHER; note = 2'-O-methyl modified nucleotide
  modified_base 76: mod_base = OTHER; note = 2'-O-methyl modified nucleotide
  modified_base 77: mod_base = OTHER; note = 2'-O-methyl modified nucleotide
  modified_base 78: mod_base = OTHER; note = 2'-O-methyl modified nucleotide
  modified_base 79: mod_base = OTHER; note = 2'-O-methyl modified nucleotide
  modified_base 80: mod_base = OTHER; note = 2'-O-methyl modified nucleotide
  modified_base 81: mod_base = OTHER; note = 2'-O-methyl modified nucleotide
  modified_base 82: mod_base = OTHER; note = 2'-O-methyl modified nucleotide
  modified_base 83: mod_base = OTHER; note = 2'-O-methyl modified nucleotide
  modified_base 84: mod_base = OTHER; note = 2'-O-methyl modified nucleotide
  modified_base 85: mod_base = OTHER; note = 2'-O-methyl modified nucleotide
  modified_base 86: mod_base = OTHER; note = 2'-O-methyl modified nucleotide
  modified_base 87: mod_base = OTHER; note = 2'-O-methyl modified nucleotide
  modified_base 88: mod_base = OTHER; note = 2'-O-methyl modified nucleotide
  modified_base 89: mod_base = OTHER; note = 2'-O-methyl modified nucleotide
  modified_base 90: mod_base = OTHER; note = 2'-O-methyl modified nucleotide
  modified_base 91: mod_base = OTHER; note = 2'-O-methyl modified nucleotide
  modified_base 92: mod_base = OTHER; note = 2'-O-methyl modified nucleotide
  modified_base 93: mod_base = OTHER; note = 2'-O-methyl modified nucleotide
  modified_base 94: mod_base = OTHER; note = 2'-O-methyl modified nucleotide
  modified_base 95: mod_base = OTHER; note = 2'-O-methyl modified nucleotide
  modified_base 96: mod_base = OTHER; note = 2'-O-methyl modified nucleotide
  modified_base 117: mod_base = OTHER; note = Nucleotide with phosphorothioate linkage
  modified_base 118: mod_base = OTHER; note = 2'-O-methyl modified nucleotide with phosphorothioate linkage
  modified_base 119: mod_base = OTHER; note = 2'-O-methyl modified nucleotide with phosphorothioate linkage
  modified_base 120: mod_base = OTHER; note = 2'-O-methyl modified nucleotide
gctggtacacggcagggtcagttttagagctagaaatagcaagttaaaataaggctagtccgttatcaacttgaaaaagtggcaccgagtcggtgcacagatatccagaacccctgccgt

SEQ ID NO: 16540 - RNA, 119 nt, synthetic construct
  source 1..119: mol_type = other RNA
  modified_base 1: mod_base = OTHER; note = 2'-O-methyl modified nucleotide with phosphorothioate linkage
  modified_base 2: mod_base = OTHER; note = 2'-O-methyl modified nucleotide with phosphorothioate linkage
  modified_base 3: mod_base = OTHER; note = 2'-O-methyl modified nucleotide with phosphorothioate linkage
  modified_base 29: mod_base = OTHER; note = 2'-O-methyl modified nucleotide
  modified_base 30: mod_base = OTHER; note = 2'-O-methyl modified nucleotide
  modified_base 31: mod_base = OTHER; note = 2'-O-methyl modified nucleotide
  modified_base 32: mod_base = OTHER; note = 2'-O-methyl modified nucleotide
  modified_base 33: mod_base = OTHER; note = 2'-O-methyl modified nucleotide
  modified_base 34: mod_base = OTHER; note = 2'-O-methyl modified nucleotide
  modified_base 35: mod_base = OTHER; note = 2'-O-methyl modified nucleotide
  modified_base 36: mod_base = OTHER; note = 2'-O-methyl modified nucleotide
  modified_base 37: mod_base = OTHER; note = 2'-O-methyl modified nucleotide
  modified_base 38: mod_base = OTHER; note = 2'-O-methyl modified nucleotide
  modified_base 39: mod_base = OTHER; note = 2'-O-methyl modified nucleotide
  modified_base 40: mod_base = OTHER; note = 2'-O-methyl modified nucleotide
  modified_base 69: mod_base = OTHER; note = 2'-O-methyl modified nucleotide
  modified_base 70: mod_base = OTHER; note = 2'-O-methyl modified nucleotide
  modified_base 71: mod_base = OTHER; note = 2'-O-methyl modified nucleotide
  modified_base 72: mod_base = OTHER; note = 2'-O-methyl modified nucleotide
  modified_base 73: mod_base = OTHER; note = 2'-O-methyl modified nucleotide
  modified_base 74: mod_base = OTHER; note = 2'-O-methyl modified nucleotide
  modified_base 75: mod_base = OTHER; note = 2'-O-methyl modified nucleotide
  modified_base 76: mod_base = OTHER; note = 2'-O-methyl modified nucleotide
  modified_base 77: mod_base = OTHER; note = 2'-O-methyl modified nucleotide
  modified_base 78: mod_base = OTHER; note = 2'-O-methyl modified nucleotide
  modified_base 79: mod_base = OTHER; note = 2'-O-methyl modified nucleotide
  modified_base 80: mod_base = OTHER; note = 2'-O-methyl modified nucleotide
  modified_base 81: mod_base = OTHER; note = 2'-O-methyl modified nucleotide
  modified_base 82: mod_base = OTHER; note = 2'-O-methyl modified nucleotide
  modified_base 83: mod_base = OTHER; note = 2'-O-methyl modified nucleotide
  modified_base 84: mod_base = OTHER; note = 2'-O-methyl modified nucleotide
  modified_base 85: mod_base = OTHER; note = 2'-O-methyl modified nucleotide
  modified_base 86: mod_base = OTHER; note = 2'-O-methyl modified nucleotide
  modified_base 87: mod_base = OTHER; note = 2'-O-methyl modified nucleotide
  modified_base 88: mod_base = OTHER; note = 2'-O-methyl modified nucleotide
  modified_base 89: mod_base = OTHER; note = 2'-O-methyl modified nucleotide
  modified_base 90: mod_base = OTHER; note = 2'-O-methyl modified nucleotide
  modified_base 91: mod_base = OTHER; note = 2'-O-methyl modified nucleotide
  modified_base 92: mod_base = OTHER; note = 2'-O-methyl modified nucleotide
  modified_base 93: mod_base = OTHER; note = 2'-O-methyl modified nucleotide
  modified_base 94: mod_base = OTHER; note = 2'-O-methyl modified nucleotide
  modified_base 95: mod_base = OTHER; note = 2'-O-methyl modified nucleotide
  modified_base 96: mod_base = OTHER; note = 2'-O-methyl modified nucleotide
  modified_base 116: mod_base = OTHER; note = Nucleotide with phosphorothioate linkage
  modified_base 117: mod_base = OTHER; note = 2'-O-methyl modified nucleotide with phosphorothioate linkage
  modified_base 118: mod_base = OTHER; note = 2'-O-methyl modified nucleotide with phosphorothioate linkage
  modified_base 119: mod_base = OTHER; note = 2'-O-methyl modified nucleotide
gctggtacacggcagggtcagttttagagctagaaatagcaagttaaaataaggctagtccgttatcaacttgaaaaagtggcaccgagtcggtgcacagatatccagaacccctgccg

SEQ ID NO: 16541 - RNA, 126 nt, synthetic construct
  source 1..126: mol_type = other RNA
  modified_base 1: mod_base = OTHER; note = 2'-O-methyl modified nucleotide with phosphorothioate linkage
  modified_base 2: mod_base = OTHER; note = 2'-O-methyl modified nucleotide with phosphorothioate linkage
  modified_base 3: mod_base = OTHER; note = 2'-O-methyl modified nucleotide with phosphorothioate linkage
  modified_base 29: mod_base = OTHER; note = 2'-O-methyl modified nucleotide
  modified_base 30: mod_base = OTHER; note = 2'-O-methyl modified nucleotide
  modified_base 31: mod_base = OTHER; note = 2'-O-methyl modified nucleotide
  modified_base 32: mod_base = OTHER; note = 2'-O-methyl modified nucleotide
  modified_base 33: mod_base = OTHER; note = 2'-O-methyl modified nucleotide
  modified_base 34: mod_base = OTHER; note = 2'-O-methyl modified nucleotide
  modified_base 35: mod_base = OTHER; note = 2'-O-methyl modified nucleotide
  modified_base 36: mod_base = OTHER; note = 2'-O-methyl modified nucleotide
  modified_base 37: mod_base = OTHER; note = 2'-O-methyl modified nucleotide
  modified_base 38: mod_base = OTHER; note = 2'-O-methyl modified nucleotide
  modified_base 39: mod_base = OTHER; note = 2'-O-methyl modified nucleotide
  modified_base 40: mod_base = OTHER; note = 2'-O-methyl modified nucleotide
  modified_base 69: mod_base = OTHER; note = 2'-O-methyl modified nucleotide
  modified_base 70: mod_base = OTHER; note = 2'-O-methyl modified nucleotide
  modified_base 71: mod_base = OTHER; note = 2'-O-methyl modified nucleotide
  modified_base 72: mod_base = OTHER; note = 2'-O-methyl modified nucleotide
  modified_base 73: mod_base = OTHER; note = 2'-O-methyl modified nucleotide
  modified_base 74: mod_base = OTHER; note = 2'-O-methyl modified nucleotide
  modified_base 75: mod_base = OTHER; note = 2'-O-methyl modified nucleotide
  modified_base 76: mod_base = OTHER; note = 2'-O-methyl modified nucleotide
  modified_base 77: mod_base = OTHER; note = 2'-O-methyl modified nucleotide
  modified_base 78: mod_base = OTHER; note = 2'-O-methyl modified nucleotide
  modified_base 79: mod_base = OTHER; note = 2'-O-methyl modified nucleotide
  modified_base 80: mod_base = OTHER; note = 2'-O-methyl modified nucleotide
  modified_base 81: mod_base = OTHER; note = 2'-O-methyl modified nucleotide
  modified_base 82: mod_base = OTHER; note = 2'-O-methyl modified nucleotide
  modified_base 83: mod_base = OTHER; note = 2'-O-methyl modified nucleotide
  modified_base 84: mod_base = OTHER; note = 2'-O-methyl modified nucleotide
  modified_base 85: mod_base = OTHER; note = 2'-O-methyl modified nucleotide
  modified_base 86: mod_base = OTHER; note = 2'-O-methyl modified nucleotide
  modified_base 87: mod_base = OTHER; note = 2'-O-methyl modified nucleotide
  modified_base 88: mod_base = OTHER; note = 2'-O-methyl modified nucleotide
  modified_base 89: mod_base = OTHER; note = 2'-O-methyl modified nucleotide
  modified_base 90: mod_base = OTHER; note = 2'-O-methyl modified nucleotide
  modified_base 91: mod_base = OTHER; note = 2'-O-methyl modified nucleotide
  modified_base 92: mod_base = OTHER; note = 2'-O-methyl modified nucleotide
  modified_base 93: mod_base = OTHER; note = 2'-O-methyl modified nucleotide
  modified_base 94: mod_base = OTHER; note = 2'-O-methyl modified nucleotide
  modified_base 95: mod_base = OTHER; note = 2'-O-methyl modified nucleotide
  modified_base 96: mod_base = OTHER; note = 2'-O-methyl modified nucleotide
  modified_base 123: mod_base = OTHER; note = Nucleotide with phosphorothioate linkage
  modified_base 124: mod_base = OTHER; note = 2'-O-methyl modified nucleotide with phosphorothioate linkage
  modified_base 125: mod_base = OTHER; note = 2'-O-methyl modified nucleotide with phosphorothioate linkage
  modified_base 126: mod_base = OTHER; note = 2'-O-methyl modified nucleotide
gctggtacacggcagggtcagttttagagctagaaatagcaagttaaaataaggctagtccgttatcaacttgaaaaagtggcaccgagtcggtgcccacagatatccagaacccctgccgtgtac

SEQ ID NO: 16542 - RNA, 125 nt, synthetic construct
  source 1..125: mol_type = other RNA
  modified_base 1: mod_base = OTHER; note = 2'-O-methyl modified nucleotide with phosphorothioate linkage
  modified_base 2: mod_base = OTHER; note = 2'-O-methyl modified nucleotide with phosphorothioate linkage
  modified_base 3: mod_base = OTHER; note = 2'-O-methyl modified nucleotide with phosphorothioate linkage
  modified_base 29: mod_base = OTHER; note = 2'-O-methyl modified nucleotide
  modified_base 30: mod_base = OTHER; note = 2'-O-methyl modified nucleotide
  modified_base 31: mod_base = OTHER; note = 2'-O-methyl modified nucleotide
  modified_base 32: mod_base = OTHER; note = 2'-O-methyl modified nucleotide
  modified_base 33: mod_base = OTHER; note = 2'-O-methyl modified nucleotide
  modified_base 34: mod_base = OTHER; note = 2'-O-methyl modified nucleotide
  modified_base 35: mod_base = OTHER; note = 2'-O-methyl modified nucleotide
  modified_base 36: mod_base = OTHER; note = 2'-O-methyl modified nucleotide
  modified_base 37: mod_base = OTHER; note = 2'-O-methyl modified nucleotide
  modified_base 38: mod_base = OTHER; note = 2'-O-methyl modified nucleotide
  modified_base 39: mod_base = OTHER; note = 2'-O-methyl modified nucleotide
  modified_base 40: mod_base = OTHER; note = 2'-O-methyl modified nucleotide
  modified_base 69: mod_base = OTHER; note = 2'-O-methyl modified nucleotide
  modified_base 70: mod_base = OTHER; note = 2'-O-methyl modified nucleotide
  modified_base 71: mod_base = OTHER; note = 2'-O-methyl modified nucleotide
  modified_base 72: mod_base = OTHER; note = 2'-O-methyl modified nucleotide
  modified_base 73: mod_base = OTHER; note = 2'-O-methyl modified nucleotide
  modified_base 74: mod_base = OTHER; note = 2'-O-methyl modified nucleotide
  modified_base 75: mod_base = OTHER; note = 2'-O-methyl modified nucleotide
  modified_base 76: mod_base = OTHER; note = 2'-O-methyl modified nucleotide
  modified_base 77: mod_base = OTHER; note = 2'-O-methyl modified nucleotide
  modified_base 78: mod_base = OTHER; note = 2'-O-methyl modified nucleotide
  modified_base 79: mod_base = OTHER; note = 2'-O-methyl modified nucleotide
  modified_base 80: mod_base = OTHER; note = 2'-O-methyl modified nucleotide
  modified_base 81: mod_base = OTHER; note = 2'-O-methyl modified nucleotide
  modified_base 82: mod_base = OTHER; note = 2'-O-methyl modified nucleotide
  modified_base 83: mod_base = OTHER; note = 2'-O-methyl modified nucleotide
  modified_base 84: mod_base = OTHER; note = 2'-O-methyl modified nucleotide
  modified_base 85: mod_base = OTHER; note = 2'-O-methyl modified nucleotide
  modified_base 86: mod_base = OTHER; note = 2'-O-methyl modified nucleotide
  modified_base 87: mod_base = OTHER; note = 2'-O-methyl modified nucleotide
  modified_base 88: mod_base = OTHER; note = 2'-O-methyl modified nucleotide
  modified_base 89: mod_base = OTHER; note = 2'-O-methyl modified nucleotide
  modified_base 90: mod_base = OTHER; note = 2'-O-methyl modified nucleotide
  modified_base 91: mod_base = OTHER; note = 2'-O-methyl modified nucleotide
  modified_base 92: mod_base = OTHER; note = 2'-O-methyl modified nucleotide
  modified_base 93: mod_base = OTHER; note = 2'-O-methyl modified nucleotide
  modified_base 94: mod_base = OTHER; note = 2'-O-methyl modified nucleotide
  modified_base 95: mod_base = OTHER; note = 2'-O-methyl modified nucleotide
  modified_base 96: mod_base = OTHER; note = 2'-O-methyl modified nucleotide
  modified_base 122: mod_base = OTHER; note = Nucleotide with phosphorothioate linkage
  modified_base 123: mod_base = OTHER; note = 2'-O-methyl modified nucleotide with phosphorothioate linkage
  modified_base 124: mod_base = OTHER; note = 2'-O-methyl modified nucleotide with phosphorothioate linkage
  modified_base 125: mod_base = OTHER; note = 2'-O-methyl modified nucleotide
gctggtacacggcagggtcagttttagagctagaaatagcaagttaaaataaggctagtccgttatcaacttgaaaaagtggcaccgagtcggtgcccacagatatccagaacccctgccgtgta

SEQ ID NO: 16543 - RNA, 124 nt, synthetic construct
  source 1..124: mol_type = other RNA
  modified_base 1: mod_base = OTHER; note = 2'-O-methyl modified nucleotide with phosphorothioate linkage
  modified_base 2: mod_base = OTHER; note = 2'-O-methyl modified nucleotide with phosphorothioate linkage
  modified_base 3: mod_base = OTHER; note = 2'-O-methyl modified nucleotide with phosphorothioate linkage
  modified_base 29: mod_base = OTHER; note = 2'-O-methyl modified nucleotide
  modified_base 30: mod_base = OTHER; note = 2'-O-methyl modified nucleotide
  modified_base 31: mod_base = OTHER; note = 2'-O-methyl modified nucleotide
  modified_base 32: mod_base = OTHER; note = 2'-O-methyl modified nucleotide
  modified_base 33: mod_base = OTHER; note = 2'-O-methyl modified nucleotide
  modified_base 34: mod_base = OTHER; note = 2'-O-methyl modified nucleotide
  modified_base 35: mod_base = OTHER; note = 2'-O-methyl modified nucleotide
  modified_base 36: mod_base = OTHER; note = 2'-O-methyl modified nucleotide
  modified_base 37: mod_base = OTHER; note = 2'-O-methyl modified nucleotide
  modified_base 38: mod_base = OTHER; note = 2'-O-methyl modified nucleotide
  modified_base 39: mod_base = OTHER; note = 2'-O-methyl modified nucleotide
  modified_base 40: mod_base = OTHER; note = 2'-O-methyl modified nucleotide
  modified_base 69: mod_base = OTHER; note = 2'-O-methyl modified nucleotide
  modified_base 70: mod_base = OTHER; note = 2'-O-methyl modified nucleotide
  modified_base 71: mod_base = OTHER; note = 2'-O-methyl modified nucleotide
  modified_base 72: mod_base = OTHER; note = 2'-O-methyl modified nucleotide
  modified_base 73: mod_base = OTHER; note = 2'-O-methyl modified nucleotide
  modified_base 74: mod_base = OTHER; note = 2'-O-methyl modified nucleotide
  modified_base 75: mod_base = OTHER; note = 2'-O-methyl modified nucleotide
  modified_base 76: mod_base = OTHER; note = 2'-O-methyl modified nucleotide
  modified_base 77: mod_base = OTHER; note = 2'-O-methyl modified nucleotide
  modified_base 78: mod_base = OTHER; note = 2'-O-methyl modified nucleotide
  modified_base 79: mod_base = OTHER; note = 2'-O-methyl modified nucleotide
  modified_base 80: mod_base = OTHER; note = 2'-O-methyl modified nucleotide
  modified_base 81: mod_base = OTHER; note = 2'-O-methyl modified nucleotide
  modified_base 82: mod_base = OTHER; note = 2'-O-methyl modified nucleotide
  modified_base 83: mod_base = OTHER; note = 2'-O-methyl modified nucleotide
  modified_base 84: mod_base = OTHER; note = 2'-O-methyl modified nucleotide
  modified_base 85: mod_base = OTHER; note = 2'-O-methyl modified nucleotide
  modified_base 86: mod_base = OTHER; note = 2'-O-methyl modified nucleotide
  modified_base 87: mod_base = OTHER; note = 2'-O-methyl modified nucleotide
  modified_base 88: mod_base = OTHER; note = 2'-O-methyl modified nucleotide
  modified_base 89: mod_base = OTHER; note = 2'-O-methyl modified nucleotide
  modified_base 90: mod_base = OTHER; note = 2'-O-methyl modified nucleotide
  modified_base 91: mod_base = OTHER; note = 2'-O-methyl modified nucleotide
  modified_base 92: mod_base = OTHER; note = 2'-O-methyl modified nucleotide
  modified_base 93: mod_base = OTHER; note = 2'-O-methyl modified nucleotide
  modified_base 94: mod_base = OTHER; note = 2'-O-methyl modified nucleotide
  modified_base 95: mod_base = OTHER; note = 2'-O-methyl modified nucleotide
  modified_base 96: mod_base = OTHER; note = 2'-O-methyl modified nucleotide
  modified_base 121: mod_base = OTHER; note = Nucleotide with phosphorothioate linkage
  modified_base 122: mod_base = OTHER; note = 2'-O-methyl modified nucleotide with phosphorothioate linkage
  modified_base 123: mod_base = OTHER; note = 2'-O-methyl modified nucleotide with phosphorothioate linkage
  modified_base 124: mod_base = OTHER; note = 2'-O-methyl modified nucleotide
gctggtacacggcagggtcagttttagagctagaaatagcaagttaaaataaggctagtccgttatcaacttgaaaaagtggcaccgagtcggtgcccacagatatccagaacccctgccgtgt

SEQ ID NO: 16544 - RNA, 123 nt, synthetic construct
  source 1..123: mol_type = other RNA
  modified_base 1: mod_base = OTHER; note = 2'-O-methyl modified nucleotide with phosphorothioate linkage
  modified_base 2: mod_base = OTHER; note = 2'-O-methyl modified nucleotide with phosphorothioate linkage
  modified_base 3: mod_base = OTHER; note = 2'-O-methyl modified nucleotide with phosphorothioate linkage
  modified_base 29: mod_base = OTHER; note = 2'-O-methyl modified nucleotide
  modified_base 30: mod_base = OTHER; note = 2'-O-methyl modified nucleotide
  modified_base 31: mod_base = OTHER; note = 2'-O-methyl modified nucleotide
  modified_base 32: mod_base = OTHER; note = 2'-O-methyl modified nucleotide
  modified_base 33: mod_base = OTHER; note = 2'-O-methyl modified nucleotide
  modified_base 34: mod_base = OTHER; note = 2'-O-methyl modified nucleotide
  modified_base 35: mod_base = OTHER; note = 2'-O-methyl modified nucleotide
  modified_base 36: mod_base = OTHER; note = 2'-O-methyl modified nucleotide
  modified_base 37: mod_base = OTHER; note = 2'-O-methyl modified nucleotide
  modified_base 38: mod_base = OTHER; note = 2'-O-methyl modified nucleotide
  modified_base 39: mod_base = OTHER; note = 2'-O-methyl modified nucleotide
  modified_base 40: mod_base = OTHER; note = 2'-O-methyl modified nucleotide
  modified_base 69: mod_base = OTHER; note = 2'-O-methyl modified nucleotide
  modified_base 70: mod_base = OTHER; note = 2'-O-methyl modified nucleotide
  modified_base 71: mod_base = OTHER; note = 2'-O-methyl modified nucleotide
  modified_base 72: mod_base = OTHER; note = 2'-O-methyl modified nucleotide
  modified_base 73: mod_base = OTHER; note = 2'-O-methyl modified nucleotide
  modified_base 74: mod_base = OTHER; note = 2'-O-methyl modified nucleotide
  modified_base 75: mod_base = OTHER; note = 2'-O-methyl modified nucleotide
  modified_base 76: mod_base = OTHER; note = 2'-O-methyl modified nucleotide
  modified_base 77: mod_base = OTHER; note = 2'-O-methyl modified nucleotide
  modified_base 78: mod_base = OTHER; note = 2'-O-methyl modified nucleotide
  modified_base 79: mod_base = OTHER; note = 2'-O-methyl modified nucleotide
  modified_base 80: mod_base = OTHER; note = 2'-O-methyl modified nucleotide
  modified_base 81: mod_base = OTHER; note = 2'-O-methyl modified nucleotide
  modified_base 82: mod_base = OTHER; note = 2'-O-methyl modified nucleotide
  modified_base 83: mod_base = OTHER; note = 2'-O-methyl modified nucleotide
  modified_base 84: mod_base = OTHER; note = 2'-O-methyl modified nucleotide
  modified_base 85: mod_base = OTHER; note = 2'-O-methyl modified nucleotide
  modified_base 86: mod_base = OTHER; note = 2'-O-methyl modified nucleotide
  modified_base 87: mod_base = OTHER; note = 2'-O-methyl modified nucleotide
  modified_base 88: mod_base = OTHER; note = 2'-O-methyl modified nucleotide
  modified_base 89: mod_base = OTHER; note = 2'-O-methyl modified nucleotide
  modified_base 90: mod_base = OTHER; note = 2'-O-methyl modified nucleotide
  modified_base 91: mod_base = OTHER; note = 2'-O-methyl modified nucleotide
  modified_base 92: mod_base = OTHER; note = 2'-O-methyl modified nucleotide
  modified_base 93: mod_base = OTHER; note = 2'-O-methyl modified nucleotide
  modified_base 94: mod_base = OTHER; note = 2'-O-methyl modified nucleotide
  modified_base 95: mod_base = OTHER; note = 2'-O-methyl modified nucleotide
  modified_base 96: mod_base = OTHER; note = 2'-O-methyl modified nucleotide
  modified_base 120: mod_base = OTHER; note = Nucleotide with phosphorothioate linkage
  modified_base 121: mod_base = OTHER; note = 2'-O-methyl modified nucleotide with phosphorothioate linkage
  modified_base 122: mod_base = OTHER; note = 2'-O-methyl modified nucleotide with phosphorothioate linkage
  modified_base 123: mod_base = OTHER; note = 2'-O-methyl modified nucleotide
gctggtacacggcagggtcagttttagagctagaaatagcaagttaaaataaggctagtccgttatcaacttgaaaaagtggcaccgagtcggtgcccacagatatccagaacccctgccgtg

SEQ ID NO: 16545 - RNA, 122 nt, synthetic construct
  source 1..122: mol_type = other RNA
  modified_base 1: mod_base = OTHER; note = 2'-O-methyl modified nucleotide with phosphorothioate linkage
  modified_base 2: mod_base = OTHER; note = 2'-O-methyl modified nucleotide with phosphorothioate linkage
  modified_base 3: mod_base = OTHER; note = 2'-O-methyl modified nucleotide with phosphorothioate linkage
  modified_base 29: mod_base = OTHER; note = 2'-O-methyl modified nucleotide
  modified_base 30: mod_base = OTHER; note = 2'-O-methyl modified nucleotide
  modified_base 31: mod_base = OTHER; note = 2'-O-methyl modified nucleotide
  modified_base 32: mod_base = OTHER; note = 2'-O-methyl modified nucleotide
  modified_base 33: mod_base = OTHER; note = 2'-O-methyl modified nucleotide
  modified_base 34: mod_base = OTHER; note = 2'-O-methyl modified nucleotide
  modified_base 35: mod_base = OTHER; note = 2'-O-methyl modified nucleotide
  modified_base 36: mod_base = OTHER; note = 2'-O-methyl modified nucleotide
  modified_base 37: mod_base = OTHER; note = 2'-O-methyl modified nucleotide
  modified_base 38: mod_base = OTHER; note = 2'-O-methyl modified nucleotide
  modified_base 39: mod_base = OTHER; note = 2'-O-methyl modified nucleotide
  modified_base 40: mod_base = OTHER; note = 2'-O-methyl modified nucleotide
  modified_base 69: mod_base = OTHER; note = 2'-O-methyl modified nucleotide
  modified_base 70: mod_base = OTHER; note = 2'-O-methyl modified nucleotide
  modified_base 71: mod_base = OTHER; note = 2'-O-methyl modified nucleotide
  modified_base 72: mod_base = OTHER; note = 2'-O-methyl modified nucleotide
  modified_base 73: mod_base = OTHER; note = 2'-O-methyl modified nucleotide
  modified_base 74: mod_base = OTHER; note = 2'-O-methyl modified nucleotide
  modified_base 75: mod_base = OTHER; note = 2'-O-methyl modified nucleotide
  modified_base 76: mod_base = OTHER; note = 2'-O-methyl modified nucleotide
  modified_base 77: mod_base = OTHER; note = 2'-O-methyl modified nucleotide
  modified_base 78: mod_base = OTHER; note = 2'-O-methyl modified nucleotide
  modified_base 79: mod_base = OTHER; note = 2'-O-methyl modified nucleotide
  modified_base 80: mod_base = OTHER; note = 2'-O-methyl modified nucleotide
  modified_base 81: mod_base = OTHER; note = 2'-O-methyl modified nucleotide
  modified_base 82: mod_base = OTHER; note = 2'-O-methyl modified nucleotide
  modified_base 83: mod_base = OTHER; note = 2'-O-methyl modified nucleotide
  modified_base 84: mod_base = OTHER; note = 2'-O-methyl modified nucleotide
  modified_base 85: mod_base = OTHER; note = 2'-O-methyl modified nucleotide
  modified_base 86: mod_base = OTHER; note = 2'-O-methyl modified nucleotide
  modified_base 87: mod_base = OTHER; note = 2'-O-methyl modified nucleotide
  modified_base 88: mod_base = OTHER; note = 2'-O-methyl modified nucleotide
  modified_base 89: mod_base = OTHER; note = 2'-O-methyl modified nucleotide
  modified_base 90: mod_base = OTHER; note = 2'-O-methyl modified nucleotide
  modified_base 91: mod_base = OTHER; note = 2'-O-methyl modified nucleotide
  modified_base 92: mod_base = OTHER; note = 2'-O-methyl modified nucleotide
  modified_base 93: mod_base = OTHER; note = 2'-O-methyl modified nucleotide
  modified_base 94: mod_base = OTHER; note = 2'-O-methyl modified nucleotide
  modified_base 95: mod_base = OTHER; note = 2'-O-methyl modified nucleotide
  modified_base 96: mod_base = OTHER; note = 2'-O-methyl modified nucleotide
  modified_base 119: mod_base = OTHER; note = Nucleotide with phosphorothioate linkage
  modified_base 120: mod_base = OTHER; note = 2'-O-methyl modified nucleotide with phosphorothioate linkage
  modified_base 121: mod_base = OTHER; note = 2'-O-methyl modified nucleotide with phosphorothioate linkage
  modified_base 122: mod_base = OTHER; note = 2'-O-methyl modified nucleotide
gctggtacacggcagggtcagttttagagctagaaatagcaagttaaaataaggctagtccgttatcaacttgaaaaagtggcaccgagtcggtgcccacagatatccagaacccctgccgt

SEQ ID NO: 16546 - RNA, 121 nt, synthetic construct
  source 1..121: mol_type = other RNA
  modified_base 1: mod_base = OTHER; note = 2'-O-methyl modified nucleotide with phosphorothioate linkage
  modified_base 2: mod_base = OTHER; note = 2'-O-methyl modified nucleotide with phosphorothioate linkage
  modified_base 3: mod_base = OTHER; note = 2'-O-methyl modified nucleotide with phosphorothioate linkage
  modified_base 29: mod_base = OTHER; note = 2'-O-methyl modified nucleotide
  modified_base 30: mod_base = OTHER; note = 2'-O-methyl modified nucleotide
  modified_base 31: mod_base = OTHER; note = 2'-O-methyl modified nucleotide
  modified_base 32: mod_base = OTHER; note = 2'-O-methyl modified nucleotide
  modified_base 33: mod_base = OTHER; note = 2'-O-methyl modified nucleotide
  modified_base 34: mod_base = OTHER; note = 2'-O-methyl modified nucleotide
  modified_base 35: mod_base = OTHER; note = 2'-O-methyl modified nucleotide
  modified_base 36: mod_base = OTHER; note = 2'-O-methyl modified nucleotide
  modified_base 37: mod_base = OTHER; note = 2'-O-methyl modified nucleotide
  modified_base 38: mod_base = OTHER; note = 2'-O-methyl modified nucleotide
  modified_base 39: mod_base = OTHER; note = 2'-O-methyl modified nucleotide
  modified_base 40: mod_base = OTHER; note = 2'-O-methyl modified nucleotide
  modified_base 69: mod_base = OTHER; note = 2'-O-methyl modified nucleotide
  modified_base 70: mod_base = OTHER; note = 2'-O-methyl modified nucleotide
  modified_base 71: mod_base = OTHER; note = 2'-O-methyl modified nucleotide
  modified_base 72: mod_base = OTHER; note = 2'-O-methyl modified nucleotide
  modified_base 73: mod_base = OTHER; note = 2'-O-methyl modified nucleotide
  modified_base 74: mod_base = OTHER; note = 2'-O-methyl modified nucleotide
  modified_base 75: mod_base = OTHER; note = 2'-O-methyl modified nucleotide
  modified_base 76: mod_base = OTHER; note = 2'-O-methyl modified nucleotide
  modified_base 77: mod_base = OTHER; note = 2'-O-methyl modified nucleotide
  modified_base 78: mod_base = OTHER; note = 2'-O-methyl modified nucleotide
  modified_base 79: mod_base = OTHER; note = 2'-O-methyl modified nucleotide
  modified_base 80: mod_base = OTHER; note = 2'-O-methyl modified nucleotide
  modified_base 81: mod_base = OTHER; note = 2'-O-methyl modified nucleotide
  modified_base 82: mod_base = OTHER; note = 2'-O-methyl modified nucleotide
  modified_base 83: mod_base = OTHER; note = 2'-O-methyl modified nucleotide
  modified_base 84: mod_base = OTHER; note = 2'-O-methyl modified nucleotide
  modified_base 85: mod_base = OTHER; note = 2'-O-methyl modified nucleotide
  modified_base 86: mod_base = OTHER; note = 2'-O-methyl modified nucleotide
  modified_base 87: mod_base = OTHER; note = 2'-O-methyl modified nucleotide
  modified_base 88: mod_base = OTHER; note = 2'-O-methyl modified nucleotide
  modified_base 89: mod_base = OTHER; note = 2'-O-methyl modified nucleotide
  modified_base 90: mod_base = OTHER; note = 2'-O-methyl modified nucleotide
  modified_base 91: mod_base = OTHER; note = 2'-O-methyl modified nucleotide
  modified_base 92: mod_base = OTHER; note = 2'-O-methyl modified nucleotide
  modified_base 93: mod_base = OTHER; note = 2'-O-methyl modified nucleotide
  modified_base 94: mod_base = OTHER; note = 2'-O-methyl modified nucleotide
  modified_base 95: mod_base = OTHER; note = 2'-O-methyl modified nucleotide
  modified_base 96: mod_base = OTHER; note = 2'-O-methyl modified nucleotide
  modified_base 118: mod_base = OTHER; note = Nucleotide with phosphorothioate linkage
  modified_base 119: mod_base = OTHER; note = 2'-O-methyl modified nucleotide with phosphorothioate linkage
  modified_base 120: mod_base = OTHER; note = 2'-O-methyl modified nucleotide with phosphorothioate linkage
  modified_base 121: mod_base = OTHER; note = 2'-O-methyl modified nucleotide
gctggtacacggcagggtcagttttagagctagaaatagcaagttaaaataaggctagtccgttatcaacttgaaaaagtggcaccgagtcggtgcccacagatatccagaacccctgccg

SEQ ID NO: 16547 - RNA, 114 nt, synthetic construct
  source 1..114: mol_type = other RNA
  modified_base 1: mod_base = OTHER; note = 2'-O-methyl modified nucleotide with phosphorothioate linkage
  modified_base 2: mod_base = OTHER; note = 2'-O-methyl modified nucleotide with phosphorothioate linkage
  modified_base 3: mod_base = OTHER; note = 2'-O-methyl modified nucleotide with phosphorothioate linkage
  modified_base 29: mod_base = OTHER; note = 2'-O-methyl modified nucleotide
  modified_base 30: mod_base = OTHER; note = 2'-O-methyl modified nucleotide
  modified_base 31: mod_base = OTHER; note = 2'-O-methyl modified nucleotide
  modified_base 32: mod_base = OTHER; note = 2'-O-methyl modified nucleotide
  modified_base 33: mod_base = OTHER; note = 2'-O-methyl modified nucleotide
  modified_base 34: mod_base = OTHER; note = 2'-O-methyl modified nucleotide
  modified_base 35: mod_base = OTHER; note = 2'-O-methyl modified nucleotide
  modified_base 36: mod_base = OTHER; note = 2'-O-methyl modified nucleotide
  modified_base 37: mod_base = OTHER; note = 2'-O-methyl modified nucleotide
  modified_base 38: mod_base = OTHER; note = 2'-O-methyl modified nucleotide
  modified_base 39: mod_base = OTHER; note = 2'-O-methyl modified nucleotide
  modified_base 40: mod_base = OTHER; note = 2'-O-methyl modified nucleotide
  modified_base 69: mod_base = OTHER; note = 2'-O-methyl modified nucleotide
  modified_base 70: mod_base = OTHER; note = 2'-O-methyl modified nucleotide
  modified_base 71: mod_base = OTHER; note = 2'-O-methyl modified nucleotide
  modified_base 72: mod_base = OTHER; note = 2'-O-methyl modified nucleotide
  modified_base 73: mod_base = OTHER; note = 2'-O-methyl modified nucleotide
  modified_base 74: mod_base = OTHER; note = 2'-O-methyl modified nucleotide
  modified_base 75: mod_base = OTHER; note = 2'-O-methyl modified nucleotide
  modified_base 76: mod_base = OTHER; note = 2'-O-methyl modified nucleotide
  modified_base 77: mod_base = OTHER; note = 2'-O-methyl modified nucleotide
  modified_base 78: mod_base = OTHER; note = 2'-O-methyl modified nucleotide
  modified_base 79: mod_base = OTHER; note = 2'-O-methyl modified nucleotide
  modified_base 80: mod_base = OTHER; note = 2'-O-methyl modified nucleotide
  modified_base 81: mod_base = OTHER; note = 2'-O-methyl modified nucleotide
  modified_base 82: mod_base = OTHER; note = 2'-O-methyl modified nucleotide
  modified_base 83: mod_base = OTHER; note = 2'-O-methyl modified nucleotide
  modified_base 84: mod_base = OTHER; note = 2'-O-methyl modified nucleotide
  modified_base 85: mod_base = OTHER; note = 2'-O-methyl modified nucleotide
  modified_base 86: mod_base = OTHER; note = 2'-O-methyl modified nucleotide
  modified_base 87: mod_base = OTHER; note = 2'-O-methyl modified nucleotide
  modified_base 88: mod_base = OTHER; note = 2'-O-methyl modified nucleotide
  modified_base 89: mod_base = OTHER; note = 2'-O-methyl modified nucleotide
  modified_base 90: mod_base = OTHER; note = 2'-O-methyl modified nucleotide
  modified_base 91: mod_base = OTHER; note = 2'-O-methyl modified nucleotide
  modified_base 92: mod_base = OTHER; note = 2'-O-methyl modified nucleotide
  modified_base 93: mod_base = OTHER; note = 2'-O-methyl modified nucleotide
  modified_base 94: mod_base = OTHER; note = 2'-O-methyl modified nucleotide
  modified_base 95: mod_base = OTHER; note = 2'-O-methyl modified nucleotide
  modified_base 96: mod_base = OTHER; note = 2'-O-methyl modified nucleotide
  modified_base 111: mod_base = OTHER; note = Nucleotide with phosphorothioate linkage
  modified_base 112: mod_base = OTHER; note = 2'-O-methyl modified nucleotide with phosphorothioate linkage
  modified_base 113: mod_base = OTHER; note = 2'-O-methyl modified nucleotide with phosphorothioate linkage
  modified_base 114: mod_base = OTHER; note = 2'-O-methyl modified nucleotide
gctggtacacggcagggtcagttttagagctagaaatagcaagttaaaataaggctagtccgttatcaacttgaaaaagtggcaccgagtcggtgcccagaccctgccgtgtac

SEQ ID NO: 16548 - RNA, 113 nt, synthetic construct
  source 1..113: mol_type = other RNA
  modified_base 1: mod_base = OTHER; note = 2'-O-methyl modified nucleotide with phosphorothioate linkage
  modified_base 2: mod_base = OTHER; note = 2'-O-methyl modified nucleotide with phosphorothioate linkage
  modified_base 3: mod_base = OTHER; note = 2'-O-methyl modified nucleotide with phosphorothioate linkage
  modified_base 29: mod_base = OTHER; note = 2'-O-methyl modified nucleotide
  modified_base 30: mod_base = OTHER; note = 2'-O-methyl modified nucleotide
  modified_base 31: mod_base = OTHER; note = 2'-O-methyl modified nucleotide
  modified_base 32: mod_base = OTHER; note = 2'-O-methyl modified nucleotide
  modified_base 33: mod_base = OTHER; note = 2'-O-methyl modified nucleotide
  modified_base 34: mod_base = OTHER; note = 2'-O-methyl modified nucleotide
  modified_base 35: mod_base = OTHER; note = 2'-O-methyl modified nucleotide
  modified_base 36: mod_base = OTHER; note = 2'-O-methyl modified nucleotide
  modified_base 37: mod_base = OTHER; note = 2'-O-methyl modified nucleotide
  modified_base 38: mod_base = OTHER; note = 2'-O-methyl modified nucleotide
  modified_base 39: mod_base = OTHER; note = 2'-O-methyl modified nucleotide
  modified_base 40: mod_base = OTHER; note = 2'-O-methyl modified nucleotide
  modified_base 69: mod_base = OTHER; note = 2'-O-methyl modified nucleotide
  modified_base 70: mod_base = OTHER; note = 2'-O-methyl modified nucleotide
  modified_base 71: mod_base = OTHER; note = 2'-O-methyl modified nucleotide
  modified_base 72: mod_base = OTHER; note = 2'-O-methyl modified nucleotide
  modified_base 73: mod_base = OTHER; note = 2'-O-methyl modified nucleotide
  modified_base 74: mod_base = OTHER; note = 2'-O-methyl modified nucleotide
  modified_base 75: mod_base = OTHER; note = 2'-O-methyl modified nucleotide
  modified_base 76: mod_base = OTHER; note = 2'-O-methyl modified nucleotide
  modified_base 77: mod_base = OTHER; note = 2'-O-methyl modified nucleotide
  modified_base 78: mod_base = OTHER; note = 2'-O-methyl modified nucleotide
  modified_base 79: mod_base = OTHER; note = 2'-O-methyl modified nucleotide
  modified_base 80: mod_base = OTHER; note = 2'-O-methyl modified nucleotide
  modified_base 81: mod_base = OTHER; note = 2'-O-methyl modified nucleotide
  modified_base 82: mod_base = OTHER; note = 2'-O-methyl modified nucleotide
  modified_base 83: mod_base = OTHER; note = 2'-O-methyl modified nucleotide
  modified_base 84: mod_base = OTHER; note = 2'-O-methyl modified nucleotide
  modified_base 85: mod_base = OTHER; note = 2'-O-methyl modified nucleotide
  modified_base 86: mod_base = OTHER; note = 2'-O-methyl modified nucleotide
  modified_base 87: mod_base = OTHER; note = 2'-O-methyl modified nucleotide
  modified_base 88: mod_base = OTHER; note = 2'-O-methyl modified nucleotide
  modified_base 89: mod_base = OTHER; note = 2'-O-methyl modified nucleotide
  modified_base 90: mod_base = OTHER; note = 2'-O-methyl modified nucleotide
  modified_base 91: mod_base = OTHER; note = 2'-O-methyl modified nucleotide
  modified_base 92: mod_base = OTHER; note = 2'-O-methyl modified nucleotide
  modified_base 93: mod_base = OTHER; note = 2'-O-methyl modified nucleotide
  modified_base 94: mod_base = OTHER; note = 2'-O-methyl modified nucleotide
  modified_base 95: mod_base = OTHER; note = 2'-O-methyl modified nucleotide
  modified_base 96: mod_base = OTHER; note = 2'-O-methyl modified nucleotide
  modified_base 110: mod_base = OTHER; note = Nucleotide with phosphorothioate linkage
  modified_base 111: mod_base = OTHER; note = 2'-O-methyl modified nucleotide with phosphorothioate linkage
  modified_base 112: mod_base = OTHER; note = 2'-O-methyl modified nucleotide with phosphorothioate linkage
  modified_base 113: mod_base = OTHER; note = 2'-O-methyl modified nucleotide
gctggtacacggcagggtcagttttagagctagaaatagcaagttaaaataaggctagtccgttatcaacttgaaaaagtggcaccgagtcggtgcccagaccctgccgtgta

SEQ ID NO: 16549 - RNA, 112 nt, synthetic construct
  source 1..112: mol_type = other RNA
  modified_base 1: mod_base = OTHER; note = 2'-O-methyl modified nucleotide with phosphorothioate linkage
  modified_base 2: mod_base = OTHER; note = 2'-O-methyl modified nucleotide with phosphorothioate linkage
  modified_base 3: mod_base = OTHER; note = 2'-O-methyl modified nucleotide with phosphorothioate linkage
  modified_base 29: mod_base = OTHER; note = 2'-O-methyl modified nucleotide
  modified_base 30: mod_base = OTHER; note = 2'-O-methyl modified nucleotide
  modified_base 31: mod_base = OTHER; note = 2'-O-methyl modified nucleotide
  modified_base 32: mod_base = OTHER; note = 2'-O-methyl modified nucleotide
  modified_base 33: mod_base = OTHER; note = 2'-O-methyl modified nucleotide
  modified_base 34: mod_base = OTHER; note = 2'-O-methyl modified nucleotide
  modified_base 35: mod_base = OTHER; note = 2'-O-methyl modified nucleotide
  modified_base 36: mod_base = OTHER; note = 2'-O-methyl modified nucleotide
  modified_base 37: mod_base = OTHER; note = 2'-O-methyl modified nucleotide
  modified_base 38: mod_base = OTHER; note = 2'-O-methyl modified nucleotide
  modified_base 39: mod_base = OTHER; note = 2'-O-methyl modified nucleotide
  modified_base 40: mod_base = OTHER; note = 2'-O-methyl modified nucleotide
  modified_base 69: mod_base = OTHER; note = 2'-O-methyl modified nucleotide
  modified_base 70: mod_base = OTHER; note = 2'-O-methyl modified nucleotide
  modified_base 71: mod_base = OTHER; note = 2'-O-methyl modified nucleotide
  modified_base 72: mod_base = OTHER; note = 2'-O-methyl modified nucleotide
  modified_base 73: mod_base = OTHER; note = 2'-O-methyl modified nucleotide
  modified_base 74: mod_base = OTHER; note = 2'-O-methyl modified nucleotide
  modified_base 75: mod_base = OTHER; note = 2'-O-methyl modified nucleotide
  modified_base 76: mod_base = OTHER; note = 2'-O-methyl modified nucleotide
  modified_base 77: mod_base = OTHER; note = 2'-O-methyl modified nucleotide
  modified_base 78: mod_base = OTHER; note = 2'-O-methyl modified nucleotide
  modified_base 79: mod_base = OTHER; note = 2'-O-methyl modified nucleotide
  modified_base 80: mod_base = OTHER; note = 2'-O-methyl modified nucleotide
  modified_base 81: mod_base = OTHER; note = 2'-O-methyl modified nucleotide
  modified_base 82: mod_base = OTHER; note = 2'-O-methyl modified nucleotide
  modified_base 83: mod_base = OTHER; note = 2'-O-methyl modified nucleotide
  modified_base 84: mod_base = OTHER; note = 2'-O-methyl modified nucleotide
  modified_base 85: mod_base = OTHER; note = 2'-O-methyl modified nucleotide
  modified_base 86: mod_base = OTHER; note = 2'-O-methyl modified nucleotide
  modified_base 87: mod_base = OTHER; note = 2'-O-methyl modified nucleotide
  modified_base 88: mod_base = OTHER; note = 2'-O-methyl modified nucleotide
  modified_base 89: mod_base = OTHER; note = 2'-O-methyl modified nucleotide
  modified_base 90: mod_base = OTHER; note = 2'-O-methyl modified nucleotide
  modified_base 91: mod_base = OTHER; note = 2'-O-methyl modified nucleotide
  modified_base 92: mod_base = OTHER; note = 2'-O-methyl modified nucleotide
  modified_base 93: mod_base = OTHER; note = 2'-O-methyl modified nucleotide
  modified_base 94: mod_base = OTHER; note = 2'-O-methyl modified nucleotide
  modified_base 95: mod_base = OTHER; note = 2'-O-methyl modified nucleotide
  modified_base 96: mod_base = OTHER; note = 2'-O-methyl modified nucleotide
  modified_base 109: mod_base = OTHER; note = Nucleotide with phosphorothioate linkage
  modified_base 110: mod_base = OTHER; note = 2'-O-methyl modified nucleotide with phosphorothioate linkage
  modified_base 111: mod_base = OTHER; note = 2'-O-methyl modified nucleotide with phosphorothioate linkage
  modified_base 112: mod_base = OTHER; note = 2'-O-methyl modified nucleotide
gctggtacacggcagggtcagttttagagctagaaatagcaagttaaaataaggctagtccgttatcaacttgaaaaagtggcaccgagtcggtgcccagaccctgccgtgt

SEQ ID NO: 16550 - RNA, 111 nt, synthetic construct
  source 1..111: mol_type = other RNA
  modified_base 1: mod_base = OTHER; note = 2'-O-methyl modified nucleotide with phosphorothioate linkage
  modified_base 2: mod_base = OTHER; note = 2'-O-methyl modified nucleotide with phosphorothioate linkage
  modified_base 3: mod_base = OTHER; note = 2'-O-methyl modified nucleotide with phosphorothioate linkage
  modified_base 29: mod_base = OTHER; note = 2'-O-methyl modified nucleotide
  modified_base 30: mod_base = OTHER; note = 2'-O-methyl modified nucleotide
  modified_base 31: mod_base = OTHER; note = 2'-O-methyl modified nucleotide
  modified_base 32: mod_base = OTHER; note = 2'-O-methyl modified nucleotide
  modified_base 33: mod_base = OTHER; note = 2'-O-methyl modified nucleotide
  modified_base 34: mod_base = OTHER; note = 2'-O-methyl modified nucleotide
  modified_base 35: mod_base = OTHER; note = 2'-O-methyl modified nucleotide
  modified_base 36: mod_base = OTHER; note = 2'-O-methyl modified nucleotide
  modified_base 37: mod_base = OTHER; note = 2'-O-methyl modified nucleotide
  modified_base 38: mod_base = OTHER; note = 2'-O-methyl modified nucleotide
  modified_base 39: mod_base = OTHER; note = 2'-O-methyl modified nucleotide
  modified_base 40: mod_base = OTHER; note = 2'-O-methyl modified nucleotide
  modified_base 69: mod_base = OTHER; note = 2'-O-methyl modified nucleotide
  modified_base 70: mod_base = OTHER; note = 2'-O-methyl modified nucleotide
  modified_base 71: mod_base = OTHER; note = 2'-O-methyl modified nucleotide
  modified_base 72: mod_base = OTHER; note = 2'-O-methyl modified nucleotide
  modified_base 73: mod_base = OTHER; note = 2'-O-methyl modified nucleotide
  modified_base 74: mod_base = OTHER; note = 2'-O-methyl modified nucleotide
  modified_base 75: mod_base = OTHER; note = 2'-O-methyl modified nucleotide
  modified_base 76: mod_base = OTHER; note = 2'-O-methyl modified nucleotide
  modified_base 77: mod_base = OTHER; note = 2'-O-methyl modified nucleotide
  modified_base 78: mod_base = OTHER; note = 2'-O-methyl modified nucleotide
  modified_base 79: mod_base = OTHER; note = 2'-O-methyl modified nucleotide
  modified_base 80: mod_base = OTHER; note = 2'-O-methyl modified nucleotide
  modified_base 81: mod_base = OTHER; note = 2'-O-methyl modified nucleotide
  modified_base 82: mod_base = OTHER; note = 2'-O-methyl modified nucleotide
  modified_base 83: mod_base = OTHER; note = 2'-O-methyl modified nucleotide
  modified_base 84: mod_base = OTHER; note = 2'-O-methyl modified nucleotide
  modified_base 85: mod_base = OTHER; note = 2'-O-methyl modified nucleotide
  modified_base 86: mod_base = OTHER; note = 2'-O-methyl modified nucleotide
  modified_base 87: mod_base = OTHER; note = 2'-O-methyl modified nucleotide
  modified_base 88: mod_base = OTHER; note = 2'-O-methyl modified nucleotide
  modified_base 89: mod_base = OTHER; note = 2'-O-methyl modified nucleotide
  modified_base 90: mod_base = OTHER; note = 2'-O-methyl modified nucleotide
  modified_base 91: mod_base = OTHER; note = 2'-O-methyl modified nucleotide
  modified_base 92: mod_base = OTHER; note = 2'-O-methyl modified nucleotide
  modified_base 93: mod_base = OTHER; note = 2'-O-methyl modified nucleotide
  modified_base 94: mod_base = OTHER; note = 2'-O-methyl modified nucleotide
  modified_base 95: mod_base = OTHER; note = 2'-O-methyl modified nucleotide
  modified_base 96: mod_base = OTHER; note = 2'-O-methyl modified nucleotide
  modified_base 108: mod_base = OTHER; note = Nucleotide with phosphorothioate linkage
  modified_base 109: mod_base = OTHER; note = 2'-O-methyl modified nucleotide with phosphorothioate linkage
  modified_base 110: mod_base = OTHER; note = 2'-O-methyl modified nucleotide with phosphorothioate linkage
  modified_base 111: mod_base = OTHER; note = 2'-O-methyl modified nucleotide
gctggtacacggcagggtcagttttagagctagaaatagcaagttaaaataaggctagtccgttatcaacttgaaaaagtggcaccgagtcggtgcccagaccctgccgtg

SEQ ID NO: 16551 - RNA, 110 nt, synthetic construct
  source 1..110: mol_type = other RNA
  modified_base 1: mod_base = OTHER; note = 2'-O-methyl modified nucleotide with phosphorothioate linkage
  modified_base 2: mod_base = OTHER; note = 2'-O-methyl modified nucleotide with phosphorothioate linkage
  modified_base 3: mod_base = OTHER; note = 2'-O-methyl modified nucleotide with phosphorothioate linkage
  modified_base 29: mod_base = OTHER; note = 2'-O-methyl modified nucleotide
  modified_base 30: mod_base = OTHER; note = 2'-O-methyl modified nucleotide
  modified_base 31: mod_base = OTHER; note = 2'-O-methyl modified nucleotide
  modified_base 32: mod_base = OTHER; note = 2'-O-methyl modified nucleotide
  modified_base 33: mod_base = OTHER; note = 2'-O-methyl modified nucleotide
  modified_base 34: mod_base = OTHER; note = 2'-O-methyl modified nucleotide
  modified_base 35: mod_base = OTHER; note = 2'-O-methyl modified nucleotide
  modified_base 36: mod_base = OTHER; note = 2'-O-methyl modified nucleotide
  modified_base 37: mod_base = OTHER; note = 2'-O-methyl modified nucleotide
  modified_base 38: mod_base = OTHER; note = 2'-O-methyl modified nucleotide
  modified_base 39: mod_base = OTHER; note = 2'-O-methyl modified nucleotide
  modified_base 40: mod_base = OTHER; note = 2'-O-methyl modified nucleotide
  modified_base 69: mod_base = OTHER; note = 2'-O-methyl modified nucleotide
  modified_base 70: mod_base = OTHER; note = 2'-O-methyl modified nucleotide
  modified_base 71: mod_base = OTHER; note = 2'-O-methyl modified nucleotide
  modified_base 72: mod_base = OTHER; note = 2'-O-methyl modified nucleotide
  modified_base 73: mod_base = OTHER; note = 2'-O-methyl modified nucleotide
  modified_base 74: mod_base = OTHER; note = 2'-O-methyl modified nucleotide
  modified_base 75: mod_base = OTHER; note = 2'-O-methyl modified nucleotide
  modified_base 76: mod_base = OTHER; note = 2'-O-methyl modified nucleotide
  modified_base 77: mod_base = OTHER; note = 2'-O-methyl modified nucleotide
  modified_base 78: mod_base = OTHER; note = 2'-O-methyl modified nucleotide
  modified_base 79: mod_base = OTHER; note = 2'-O-methyl modified nucleotide
  modified_base 80: mod_base = OTHER; note = 2'-O-methyl modified nucleotide
  modified_base 81: mod_base = OTHER; note = 2'-O-methyl modified nucleotide
  modified_base 82: mod_base = OTHER; note = 2'-O-methyl modified nucleotide
  modified_base 83: mod_base = OTHER; note = 2'-O-methyl modified nucleotide
  modified_base 84: mod_base = OTHER; note = 2'-O-methyl modified nucleotide
  modified_base 85: mod_base = OTHER; note = 2'-O-methyl modified nucleotide
  modified_base 86: mod_base = OTHER; note = 2'-O-methyl modified nucleotide
  modified_base 87: mod_base = OTHER; note = 2'-O-methyl modified nucleotide
  modified_base 88: mod_base = OTHER; note = 2'-O-methyl modified nucleotide
  modified_base 89: mod_base = OTHER; note = 2'-O-methyl modified nucleotide
  modified_base 90: mod_base = OTHER; note = 2'-O-methyl modified nucleotide
  modified_base 91: mod_base = OTHER; note = 2'-O-methyl modified nucleotide
  modified_base 92: mod_base = OTHER; note = 2'-O-methyl modified nucleotide
  modified_base 93: mod_base = OTHER; note = 2'-O-methyl modified nucleotide
  modified_base 94: mod_base = OTHER; note = 2'-O-methyl modified nucleotide
  modified_base 95: mod_base = OTHER; note = 2'-O-methyl modified nucleotide
  modified_base 96: mod_base = OTHER; note = 2'-O-methyl modified nucleotide
  modified_base 107: mod_base = OTHER; note = Nucleotide with phosphorothioate linkage
  modified_base 108: mod_base = OTHER; note = 2'-O-methyl modified nucleotide with phosphorothioate linkage
  modified_base 109: mod_base = OTHER; note = 2'-O-methyl modified nucleotide with phosphorothioate linkage
  modified_base 110: mod_base = OTHER; note = 2'-O-methyl modified nucleotide
gctggtacacggcagggtcagttttagagctagaaatagcaagttaaaataaggctagtccgttatcaacttgaaaaagtggcaccgagtcggtgcccagaccctgccgt

SEQ ID NO: 16552 - RNA, 109 nt, synthetic construct
  source 1..109: mol_type = other RNA
  modified_base 1: mod_base = OTHER; note = 2'-O-methyl modified nucleotide with phosphorothioate linkage
  modified_base 2: mod_base = OTHER; note = 2'-O-methyl modified nucleotide with phosphorothioate linkage
  modified_base 3: mod_base = OTHER; note = 2'-O-methyl modified nucleotide with phosphorothioate linkage
  modified_base 29: mod_base = OTHER; note = 2'-O-methyl modified nucleotide
  modified_base 30: mod_base = OTHER; note = 2'-O-methyl modified nucleotide
  modified_base 31: mod_base = OTHER; note = 2'-O-methyl modified nucleotide
  modified_base 32: mod_base = OTHER; note = 2'-O-methyl modified nucleotide
  modified_base 33: mod_base = OTHER; note = 2'-O-methyl modified nucleotide
  modified_base 34: mod_base = OTHER; note = 2'-O-methyl modified nucleotide
  modified_base 35: mod_base = OTHER; note = 2'-O-methyl modified nucleotide
  modified_base 36: mod_base = OTHER; note = 2'-O-methyl modified nucleotide
  modified_base 37: mod_base = OTHER; note = 2'-O-methyl modified nucleotide
  modified_base 38: mod_base = OTHER; note = 2'-O-methyl modified nucleotide
  modified_base 39: mod_base = OTHER; note = 2'-O-methyl modified nucleotide
  modified_base 40: mod_base = OTHER; note = 2'-O-methyl modified nucleotide
  modified_base 69: mod_base = OTHER; note = 2'-O-methyl modified nucleotide
  modified_base 70: mod_base = OTHER; note = 2'-O-methyl modified nucleotide
  modified_base 71: mod_base = OTHER; note = 2'-O-methyl modified nucleotide
  modified_base 72: mod_base = OTHER; note = 2'-O-methyl modified nucleotide
  modified_base 73: mod_base = OTHER; note = 2'-O-methyl modified nucleotide
  modified_base 74: mod_base = OTHER; note = 2'-O-methyl modified nucleotide
  modified_base 75: mod_base = OTHER; note = 2'-O-methyl modified nucleotide
  modified_base 76: mod_base = OTHER; note = 2'-O-methyl modified nucleotide
  modified_base 77: mod_base = OTHER; note = 2'-O-methyl modified nucleotide
  modified_base 78: mod_base = OTHER; note = 2'-O-methyl modified nucleotide
  modified_base 79: mod_base = OTHER; note = 2'-O-methyl modified nucleotide
  modified_base 80: mod_base = OTHER; note = 2'-O-methyl modified nucleotide
  modified_base 81: mod_base = OTHER; note = 2'-O-methyl modified nucleotide
  modified_base 82: mod_base = OTHER; note = 2'-O-methyl modified nucleotide
  modified_base 83: mod_base = OTHER; note = 2'-O-methyl modified nucleotide
  modified_base 84: mod_base = OTHER; note = 2'-O-methyl modified nucleotide
  modified_base 85: mod_base = OTHER; note = 2'-O-methyl modified nucleotide
  modified_base 86: mod_base = OTHER; note = 2'-O-methyl modified nucleotide
  modified_base 87: mod_base = OTHER; note = 2'-O-methyl modified nucleotide
  modified_base 88: mod_base = OTHER; note = 2'-O-methyl modified nucleotide
  modified_base 89: mod_base = OTHER; note = 2'-O-methyl modified nucleotide
  modified_base 90: mod_base = OTHER; note = 2'-O-methyl modified nucleotide
  modified_base 91: mod_base = OTHER; note = 2'-O-methyl modified nucleotide
  modified_base 92: mod_base = OTHER; note = 2'-O-methyl modified nucleotide
  modified_base 93: mod_base = OTHER; note = 2'-O-methyl modified nucleotide
  modified_base 94: mod_base = OTHER; note = 2'-O-methyl modified nucleotide
  modified_base 95: mod_base = OTHER; note = 2'-O-methyl modified nucleotide
  modified_base 96: mod_base = OTHER; note = 2'-O-methyl modified nucleotide
  modified_base 106: mod_base = OTHER; note = Nucleotide with phosphorothioate linkage
  modified_base 107: mod_base = OTHER; note = 2'-O-methyl modified nucleotide with phosphorothioate linkage
  modified_base 108: mod_base = OTHER; note = 2'-O-methyl modified nucleotide with phosphorothioate linkage
  modified_base 109: mod_base = OTHER; note = 2'-O-methyl modified nucleotide
gctggtacacggcagggtcagttttagagctagaaatagcaagttaaaataaggctagtccgttatcaacttgaaaaagtggcaccgagtcggtgcccagaccctgccg

SEQ ID NO: 16553 - RNA, 116 nt, synthetic construct
  source 1..116: mol_type = other RNA
  modified_base 1: mod_base = OTHER; note = 2'-O-methyl modified nucleotide with phosphorothioate linkage
  modified_base 2: mod_base = OTHER; note = 2'-O-methyl modified nucleotide with phosphorothioate linkage
  modified_base 3: mod_base = OTHER; note = 2'-O-methyl modified nucleotide with phosphorothioate linkage
  modified_base 29: mod_base = OTHER; note = 2'-O-methyl modified nucleotide
  modified_base 30: mod_base = OTHER; note = 2'-O-methyl modified nucleotide
  modified_base 31: mod_base = OTHER; note = 2'-O-methyl modified nucleotide
  modified_base 32: mod_base = OTHER; note = 2'-O-methyl modified nucleotide
  modified_base 33: mod_base = OTHER; note = 2'-O-methyl modified nucleotide
  modified_base 34: mod_base = OTHER; note = 2'-O-methyl modified nucleotide
  modified_base 35: mod_base = OTHER; note = 2'-O-methyl modified nucleotide
  modified_base 36: mod_base = OTHER; note = 2'-O-methyl modified nucleotide
  modified_base 37: mod_base = OTHER; note = 2'-O-methyl modified nucleotide
  modified_base 38: mod_base = OTHER; note = 2'-O-methyl modified nucleotide
  modified_base 39: mod_base = OTHER; note = 2'-O-methyl modified nucleotide
  modified_base 40: mod_base = OTHER; note = 2'-O-methyl modified nucleotide
  modified_base 69: mod_base = OTHER; note = 2'-O-methyl modified nucleotide
  modified_base 70: mod_base = OTHER; note = 2'-O-methyl modified nucleotide
  modified_base 71: mod_base = OTHER; note = 2'-O-methyl modified nucleotide
  modified_base 72: mod_base = OTHER; note = 2'-O-methyl modified nucleotide
  modified_base 73: mod_base = OTHER; note = 2'-O-methyl modified nucleotide
  modified_base 74: mod_base = OTHER; note = 2'-O-methyl modified nucleotide
  modified_base 75: mod_base = OTHER; note = 2'-O-methyl modified nucleotide
  modified_base 76: mod_base = OTHER; note = 2'-O-methyl modified nucleotide
  modified_base 77: mod_base = OTHER; note = 2'-O-methyl modified nucleotide
  modified_base 78: mod_base = OTHER; note = 2'-O-methyl modified nucleotide
  modified_base 79: mod_base = OTHER; note = 2'-O-methyl modified nucleotide
  modified_base 80: mod_base = OTHER; note = 2'-O-methyl modified nucleotide
  modified_base 81: mod_base = OTHER; note = 2'-O-methyl modified nucleotide
  modified_base 82: mod_base = OTHER; note = 2'-O-methyl modified nucleotide
  modified_base 83: mod_base = OTHER; note = 2'-O-methyl modified nucleotide
  modified_base 84: mod_base = OTHER; note = 2'-O-methyl modified nucleotide
  modified_base 85: mod_base = OTHER; note = 2'-O-methyl modified nucleotide
  modified_base 86: mod_base = OTHER; note = 2'-O-methyl modified nucleotide
  modified_base 87: mod_base = OTHER; note = 2'-O-methyl modified nucleotide
  modified_base 88: mod_base = OTHER; note = 2'-O-methyl modified nucleotide
  modified_base 89: mod_base = OTHER; note = 2'-O-methyl modified nucleotide
  modified_base 90: mod_base = OTHER; note = 2'-O-methyl modified nucleotide
  modified_base 91: mod_base = OTHER; note = 2'-O-methyl modified nucleotide
  modified_base 92: mod_base = OTHER; note = 2'-O-methyl modified nucleotide
  modified_base 93: mod_base = OTHER; note = 2'-O-methyl modified nucleotide
  modified_base 94: mod_base = OTHER; note = 2'-O-methyl modified nucleotide
  modified_base 95: mod_base = OTHER; note = 2'-O-methyl modified nucleotide
  modified_base 96: mod_base = OTHER; note = 2'-O-methyl modified nucleotide
  modified_base 113: mod_base = OTHER; note = Nucleotide with phosphorothioate linkage
  modified_base 114: mod_base = OTHER; note = 2'-O-methyl modified nucleotide with phosphorothioate linkage
  modified_base 115: mod_base = OTHER; note = 2'-O-methyl modified nucleotide with phosphorothioate linkage
  modified_base 116: mod_base = OTHER; note = 2'-O-methyl modified nucleotide
gctggtacacggcagggtcagttttagagctagaaatagcaagttaaaataaggctagtccgttatcaacttgaaaaagtggcaccgagtcggtgcatccagaccctgccgtgtac

SEQ ID NO: 16554 - RNA, 115 nt, synthetic construct
  source 1..115: mol_type = other RNA
  modified_base 1: mod_base = OTHER; note = 2'-O-methyl modified nucleotide with phosphorothioate linkage
  modified_base 2: mod_base = OTHER; note = 2'-O-methyl modified nucleotide with phosphorothioate linkage
  modified_base 3: mod_base = OTHER; note = 2'-O-methyl modified nucleotide with phosphorothioate linkage
  modified_base 29: mod_base = OTHER; note = 2'-O-methyl modified nucleotide
  modified_base 30: mod_base = OTHER; note = 2'-O-methyl modified nucleotide
  modified_base 31: mod_base = OTHER; note = 2'-O-methyl modified nucleotide
  modified_base 32: mod_base = OTHER; note = 2'-O-methyl modified nucleotide
  modified_base 33: mod_base = OTHER; note = 2'-O-methyl modified nucleotide
  modified_base 34: mod_base = OTHER; note = 2'-O-methyl modified nucleotide
  modified_base 35: mod_base = OTHER; note = 2'-O-methyl modified nucleotide
  modified_base 36: mod_base = OTHER; note = 2'-O-methyl modified nucleotide
  modified_base 37: mod_base = OTHER; note = 2'-O-methyl modified nucleotide
  modified_base 38: mod_base = OTHER; note = 2'-O-methyl modified nucleotide
  modified_base 39: mod_base = OTHER; note = 2'-O-methyl modified nucleotide
  modified_base 40: mod_base = OTHER; note = 2'-O-methyl modified nucleotide
  modified_base 69: mod_base = OTHER; note = 2'-O-methyl modified nucleotide
  modified_base 70: mod_base = OTHER; note = 2'-O-methyl modified nucleotide
  modified_base 71: mod_base = OTHER; note = 2'-O-methyl modified nucleotide
  modified_base 72: mod_base = OTHER; note = 2'-O-methyl modified nucleotide
  modified_base 73: mod_base = OTHER; note = 2'-O-methyl modified nucleotide
  modified_base 74: mod_base = OTHER; note = 2'-O-methyl modified nucleotide
  modified_base 75: mod_base = OTHER; note = 2'-O-methyl modified nucleotide
  modified_base 76: mod_base = OTHER; note = 2'-O-methyl modified nucleotide
  modified_base 77: mod_base = OTHER; note = 2'-O-methyl modified nucleotide
  modified_base 78: mod_base = OTHER; note = 2'-O-methyl modified nucleotide
  modified_base 79: mod_base = OTHER; note = 2'-O-methyl modified nucleotide
  modified_base 80: mod_base = OTHER; note = 2'-O-methyl modified nucleotide
  modified_base 81: mod_base = OTHER; note = 2'-O-methyl modified nucleotide
  modified_base 82: mod_base = OTHER; note = 2'-O-methyl modified nucleotide
  modified_base 83: mod_base = OTHER; note = 2'-O-methyl modified nucleotide
  modified_base 84: mod_base = OTHER; note = 2'-O-methyl modified nucleotide
  modified_base 85: mod_base = OTHER; note = 2'-O-methyl modified nucleotide
  modified_base 86: mod_base = OTHER; note = 2'-O-methyl modified nucleotide
  modified_base 87: mod_base = OTHER; note = 2'-O-methyl modified nucleotide
  modified_base 88: mod_base = OTHER; note = 2'-O-methyl modified nucleotide
  modified_base 89: mod_base = OTHER; note = 2'-O-methyl modified nucleotide
  modified_base 90: mod_base = OTHER; note = 2'-O-methyl modified nucleotide
  modified_base 91: mod_base = OTHER; note = 2'-O-methyl modified nucleotide
  modified_base 92: mod_base = OTHER; note = 2'-O-methyl modified nucleotide
  modified_base 93: mod_base = OTHER; note = 2'-O-methyl modified nucleotide
  modified_base 94: mod_base = OTHER; note = 2'-O-methyl modified nucleotide
  modified_base 95: mod_base = OTHER; note = 2'-O-methyl modified nucleotide
  modified_base 96: mod_base = OTHER; note = 2'-O-methyl modified nucleotide
  modified_base 112: mod_base = OTHER; note = Nucleotide with phosphorothioate linkage
  modified_base 113: mod_base = OTHER; note = 2'-O-methyl modified nucleotide with phosphorothioate linkage
  modified_base 114: mod_base = OTHER; note = 2'-O-methyl modified nucleotide with phosphorothioate linkage
  modified_base 115: mod_base = OTHER; note = 2'-O-methyl modified nucleotide
gctggtacacggcagggtcagttttagagctagaaatagcaagttaaaataaggctagtccgttatcaacttgaaaaagtggcaccgagtcggtgcatccagaccctgccgtgta

SEQ ID NO: 16555 - RNA, 114 nt, synthetic construct
  source 1..114: mol_type = other RNA
  modified_base 1: mod_base = OTHER; note = 2'-O-methyl modified nucleotide with phosphorothioate linkage
  modified_base 2: mod_base = OTHER; note = 2'-O-methyl modified nucleotide with phosphorothioate linkage
  modified_base 3: mod_base = OTHER; note = 2'-O-methyl modified nucleotide with phosphorothioate linkage
  modified_base 29: mod_base = OTHER; note = 2'-O-methyl modified nucleotide
  modified_base 30: mod_base = OTHER; note = 2'-O-methyl modified nucleotide
  modified_base 31: mod_base = OTHER; note = 2'-O-methyl modified nucleotide
  modified_base 32: mod_base = OTHER; note = 2'-O-methyl modified nucleotide
  modified_base 33: mod_base = OTHER; note = 2'-O-methyl modified nucleotide
  modified_base 34: mod_base = OTHER; note = 2'-O-methyl modified nucleotide
  modified_base 35: mod_base = OTHER; note = 2'-O-methyl modified nucleotide
  modified_base 36: mod_base = OTHER; note = 2'-O-methyl modified nucleotide
  modified_base 37: mod_base = OTHER; note = 2'-O-methyl modified nucleotide
  modified_base 38: mod_base = OTHER; note = 2'-O-methyl modified nucleotide
  modified_base 39: mod_base = OTHER; note = 2'-O-methyl modified nucleotide
  modified_base 40: mod_base = OTHER; note = 2'-O-methyl modified nucleotide
  modified_base 69: mod_base = OTHER; note = 2'-O-methyl modified nucleotide
  modified_base 70: mod_base = OTHER; note = 2'-O-methyl modified nucleotide
  modified_base 71: mod_base = OTHER; note = 2'-O-methyl modified nucleotide
  modified_base 72: mod_base = OTHER; note = 2'-O-methyl modified nucleotide
  modified_base 73: mod_base = OTHER; note = 2'-O-methyl modified nucleotide
  modified_base 74: mod_base = OTHER; note = 2'-O-methyl modified nucleotide
  modified_base 75: mod_base = OTHER; note = 2'-O-methyl modified nucleotide
  modified_base 76: mod_base = OTHER; note = 2'-O-methyl modified nucleotide
  modified_base 77: mod_base = OTHER; note = 2'-O-methyl modified nucleotide
  modified_base 78: mod_base = OTHER; note = 2'-O-methyl modified nucleotide
  modified_base 79: mod_base = OTHER; note = 2'-O-methyl modified nucleotide
  modified_base 80: mod_base = OTHER; note = 2'-O-methyl modified nucleotide
  modified_base 81: mod_base = OTHER; note = 2'-O-methyl modified nucleotide
  modified_base 82: mod_base = OTHER; note = 2'-O-methyl modified nucleotide
  modified_base 83: mod_base = OTHER; note = 2'-O-methyl modified nucleotide
  modified_base 84: mod_base = OTHER; note = 2'-O-methyl modified nucleotide
  modified_base 85: mod_base = OTHER; note = 2'-O-methyl modified nucleotide
  modified_base 86: mod_base = OTHER; note = 2'-O-methyl modified nucleotide
  modified_base 87: mod_base = OTHER; note = 2'-O-methyl modified nucleotide
  modified_base 88: mod_base = OTHER; note = 2'-O-methyl modified nucleotide
  modified_base 89: mod_base = OTHER; note = 2'-O-methyl modified nucleotide
  modified_base 90: mod_base = OTHER; note = 2'-O-methyl modified nucleotide
  modified_base 91: mod_base = OTHER; note = 2'-O-methyl modified nucleotide
  modified_base 92: mod_base = OTHER; note = 2'-O-methyl modified nucleotide
  modified_base 93: mod_base = OTHER; note = 2'-O-methyl modified nucleotide
  modified_base 94: mod_base = OTHER; note = 2'-O-methyl modified nucleotide
  modified_base 95: mod_base = OTHER; note = 2'-O-methyl modified nucleotide
  modified_base 96: mod_base = OTHER; note = 2'-O-methyl modified nucleotide
  modified_base 111: mod_base = OTHER; note = Nucleotide with phosphorothioate linkage
  modified_base 112: mod_base = OTHER; note = 2'-O-methyl modified nucleotide with phosphorothioate linkage
  modified_base 113: mod_base = OTHER; note = 2'-O-methyl modified nucleotide with phosphorothioate linkage
  modified_base 114: mod_base = OTHER; note = 2'-O-methyl modified nucleotide
gctggtacacggcagggtcagttttagagctagaaatagcaagttaaaataaggctagtccgttatcaacttgaaaaagtggcaccgagtcggtgcatccagaccctgccgtgt

SEQ ID NO: 16556 - RNA, 113 nt, synthetic construct
  source 1..113: mol_type = other RNA
  modified_base 1: mod_base = OTHER; note = 2'-O-methyl modified nucleotide with phosphorothioate linkage
  modified_base 2: mod_base = OTHER; note = 2'-O-methyl modified nucleotide with phosphorothioate linkage
  modified_base 3: mod_base = OTHER; note = 2'-O-methyl modified nucleotide with phosphorothioate linkage
  modified_base 29: mod_base = OTHER; note = 2'-O-methyl modified nucleotide
  modified_base 30: mod_base = OTHER; note = 2'-O-methyl modified nucleotide
  modified_base 31: mod_base = OTHER; note = 2'-O-methyl modified nucleotide
  modified_base 32: mod_base = OTHER; note = 2'-O-methyl modified nucleotide
  modified_base 33: mod_base = OTHER; note = 2'-O-methyl modified nucleotide
  modified_base 34: mod_base = OTHER; note = 2'-O-methyl modified nucleotide
  modified_base 35: mod_base = OTHER; note = 2'-O-methyl modified nucleotide
  modified_base 36: mod_base = OTHER; note = 2'-O-methyl modified nucleotide
  modified_base 37: mod_base = OTHER; note = 2'-O-methyl modified nucleotide
  modified_base 38: mod_base = OTHER; note = 2'-O-methyl modified nucleotide
  modified_base 39: mod_base = OTHER; note = 2'-O-methyl modified nucleotide
  modified_base 40: mod_base = OTHER; note = 2'-O-methyl modified nucleotide
  modified_base 69: mod_base = OTHER; note = 2'-O-methyl modified nucleotide
  modified_base 70: mod_base = OTHER; note = 2'-O-methyl modified nucleotide
  modified_base 71: mod_base = OTHER; note = 2'-O-methyl modified nucleotide
  modified_base 72: mod_base = OTHER; note = 2'-O-methyl modified nucleotide
  modified_base 73: mod_base = OTHER; note = 2'-O-methyl modified nucleotide
  modified_base 74: mod_base = OTHER; note = 2'-O-methyl modified nucleotide
  modified_base 75: mod_base = OTHER; note = 2'-O-methyl modified nucleotide
  modified_base 76: mod_base = OTHER; note = 2'-O-methyl modified nucleotide
  modified_base 77: mod_base = OTHER; note = 2'-O-methyl modified nucleotide
  modified_base 78: mod_base = OTHER; note = 2'-O-methyl modified nucleotide
  modified_base 79: mod_base = OTHER; note = 2'-O-methyl modified nucleotide
  modified_base 80: mod_base = OTHER; note = 2'-O-methyl modified nucleotide
  modified_base 81: mod_base = OTHER; note = 2'-O-methyl modified nucleotide
  modified_base 82: mod_base = OTHER; note = 2'-O-methyl modified nucleotide
  modified_base 83: mod_base = OTHER; note = 2'-O-methyl modified nucleotide
  modified_base 84: mod_base = OTHER; note = 2'-O-methyl modified nucleotide
  modified_base 85: mod_base = OTHER; note = 2'-O-methyl modified nucleotide
  modified_base 86: mod_base = OTHER; note = 2'-O-methyl modified nucleotide
  modified_base 87: mod_base = OTHER; note = 2'-O-methyl modified nucleotide
  modified_base 88: mod_base = OTHER; note = 2'-O-methyl modified nucleotide
  modified_base 89: mod_base = OTHER; note = 2'-O-methyl modified nucleotide
  modified_base 90: mod_base = OTHER; note = 2'-O-methyl modified nucleotide
  modified_base 91: mod_base = OTHER; note = 2'-O-methyl modified nucleotide
  modified_base 92: mod_base = OTHER; note = 2'-O-methyl modified nucleotide
  modified_base 93: mod_base = OTHER; note = 2'-O-methyl modified nucleotide
  modified_base 94: mod_base = OTHER; note = 2'-O-methyl modified nucleotide
  modified_base 95: mod_base = OTHER; note = 2'-O-methyl modified nucleotide
  modified_base 96: mod_base = OTHER; note = 2'-O-methyl modified nucleotide
  modified_base 110: mod_base = OTHER; note = Nucleotide with phosphorothioate linkage
  modified_base 111: mod_base = OTHER; note = 2'-O-methyl modified nucleotide with phosphorothioate linkage
  modified_base 112: mod_base = OTHER; note = 2'-O-methyl modified nucleotide with phosphorothioate linkage
  modified_base 113: mod_base = OTHER; note = 2'-O-methyl modified nucleotide
gctggtacacggcagggtcagttttagagctagaaatagcaagttaaaataaggctagtccgttatcaacttgaaaaagtggcaccgagtcggtgcatccagaccctgccgtg

SEQ ID NO: 16557 - RNA, 112 nt, synthetic construct
  source 1..112: mol_type = other RNA
  modified_base 1: mod_base = OTHER; note = 2'-O-methyl modified nucleotide with phosphorothioate linkage
  modified_base 2: mod_base = OTHER; note = 2'-O-methyl modified nucleotide with phosphorothioate linkage
  modified_base 3: mod_base = OTHER; note = 2'-O-methyl modified nucleotide with phosphorothioate linkage
  modified_base 29: mod_base = OTHER; note = 2'-O-methyl modified nucleotide
  modified_base 30: mod_base = OTHER; note = 2'-O-methyl modified nucleotide
  modified_base 31: mod_base = OTHER; note = 2'-O-methyl modified nucleotide
  modified_base 32: mod_base = OTHER; note = 2'-O-methyl modified nucleotide
  modified_base 33: mod_base = OTHER; note = 2'-O-methyl modified nucleotide
  modified_base 34: mod_base = OTHER; note = 2'-O-methyl modified nucleotide
  modified_base 35: mod_base = OTHER; note = 2'-O-methyl modified nucleotide
  modified_base 36: mod_base = OTHER; note = 2'-O-methyl modified nucleotide
  modified_base 37: mod_base = OTHER; note = 2'-O-methyl modified nucleotide
  modified_base 38: mod_base = OTHER; note = 2'-O-methyl modified nucleotide
  modified_base 39: mod_base = OTHER; note = 2'-O-methyl modified nucleotide
  modified_base 40: mod_base = OTHER; note = 2'-O-methyl modified nucleotide
  modified_base 69: mod_base = OTHER; note = 2'-O-methyl modified nucleotide
  modified_base 70: mod_base = OTHER; note = 2'-O-methyl modified nucleotide
  modified_base 71: mod_base = OTHER; note = 2'-O-methyl modified nucleotide
  modified_base 72: mod_base = OTHER; note = 2'-O-methyl modified nucleotide
  modified_base 73: mod_base = OTHER; note = 2'-O-methyl modified nucleotide
  modified_base 74: mod_base = OTHER; note = 2'-O-methyl modified nucleotide
  modified_base 75: mod_base = OTHER; note = 2'-O-methyl modified nucleotide
  modified_base 76: mod_base = OTHER; note = 2'-O-methyl modified nucleotide
  modified_base 77: mod_base = OTHER; note = 2'-O-methyl modified nucleotide
  modified_base 78: mod_base = OTHER; note = 2'-O-methyl modified nucleotide
  modified_base 79: mod_base = OTHER; note = 2'-O-methyl modified nucleotide
  modified_base 80: mod_base = OTHER; note = 2'-O-methyl modified nucleotide
  modified_base 81: mod_base = OTHER; note = 2'-O-methyl modified nucleotide
  modified_base 82: mod_base = OTHER; note = 2'-O-methyl modified nucleotide
  modified_base 83: mod_base = OTHER; note = 2'-O-methyl modified nucleotide
  modified_base 84: mod_base = OTHER; note = 2'-O-methyl modified nucleotide
  modified_base 85: mod_base = OTHER; note = 2'-O-methyl modified nucleotide
  modified_base 86: mod_base = OTHER; note = 2'-O-methyl modified nucleotide
  modified_base 87: mod_base = OTHER; note = 2'-O-methyl modified nucleotide
  modified_base 88: mod_base = OTHER; note = 2'-O-methyl modified nucleotide
  modified_base 89: mod_base = OTHER; note = 2'-O-methyl modified nucleotide
  modified_base 90: mod_base = OTHER; note = 2'-O-methyl modified nucleotide
  modified_base 91: mod_base = OTHER; note = 2'-O-methyl modified nucleotide
  modified_base 92: mod_base = OTHER; note = 2'-O-methyl modified nucleotide
  modified_base 93: mod_base = OTHER; note = 2'-O-methyl modified nucleotide
  modified_base 94: mod_base = OTHER; note = 2'-O-methyl modified nucleotide
  modified_base 95: mod_base = OTHER; note = 2'-O-methyl modified nucleotide
  modified_base 96: mod_base = OTHER; note = 2'-O-methyl modified nucleotide
  modified_base 109: mod_base = OTHER; note = Nucleotide with phosphorothioate linkage
  modified_base 110: mod_base = OTHER; note = 2'-O-methyl modified nucleotide with phosphorothioate linkage
  modified_base 111: mod_base = OTHER; note = 2'-O-methyl modified nucleotide with phosphorothioate linkage
  modified_base 112: mod_base = OTHER; note = 2'-O-methyl modified nucleotide
gctggtacacggcagggtcagttttagagctagaaatagcaagttaaaataaggctagtccgttatcaacttgaaaaagtggcaccgagtcggtgcatccagaccctgccgt

SEQ ID NO: 16558 - RNA, 111 nt, synthetic construct
  source 1..111: mol_type = other RNA
  modified_base 1: mod_base = OTHER; note = 2'-O-methyl modified nucleotide with phosphorothioate linkage
  modified_base 2: mod_base = OTHER; note = 2'-O-methyl modified nucleotide with phosphorothioate linkage
  modified_base 3: mod_base = OTHER; note = 2'-O-methyl modified nucleotide with phosphorothioate linkage
  modified_base 29: mod_base = OTHER; note = 2'-O-methyl modified nucleotide
  modified_base 30: mod_base = OTHER; note = 2'-O-methyl modified nucleotide
  modified_base 31: mod_base = OTHER; note = 2'-O-methyl modified nucleotide
  modified_base 32: mod_base = OTHER; note = 2'-O-methyl modified nucleotide
  modified_base 33: mod_base = OTHER; note = 2'-O-methyl modified nucleotide
  modified_base 34: mod_base = OTHER; note = 2'-O-methyl modified nucleotide
  modified_base 35: mod_base = OTHER; note = 2'-O-methyl modified nucleotide
  modified_base 36: mod_base = OTHER; note = 2'-O-methyl modified nucleotide
  modified_base 37: mod_base = OTHER; note = 2'-O-methyl modified nucleotide
  modified_base 38: mod_base = OTHER; note = 2'-O-methyl modified nucleotide
  modified_base 39: mod_base = OTHER; note = 2'-O-methyl modified nucleotide
  modified_base 40: mod_base = OTHER; note = 2'-O-methyl modified nucleotide
  modified_base 69: mod_base = OTHER; note = 2'-O-methyl modified nucleotide
  modified_base 70: mod_base = OTHER; note = 2'-O-methyl modified nucleotide
  modified_base 71: mod_base = OTHER; note = 2'-O-methyl modified nucleotide
  modified_base 72: mod_base = OTHER; note = 2'-O-methyl modified nucleotide
  modified_base 73: mod_base = OTHER; note = 2'-O-methyl modified nucleotide
  modified_base 74: mod_base = OTHER; note = 2'-O-methyl modified nucleotide
  modified_base 75: mod_base = OTHER; note = 2'-O-methyl modified nucleotide
  modified_base 76: mod_base = OTHER; note = 2'-O-methyl modified nucleotide
  modified_base 77: mod_base = OTHER; note = 2'-O-methyl modified nucleotide
  modified_base 78: mod_base = OTHER; note = 2'-O-methyl modified nucleotide
  modified_base 79: mod_base = OTHER; note = 2'-O-methyl modified nucleotide
  modified_base 80: mod_base = OTHER; note = 2'-O-methyl modified nucleotide
  modified_base 81: mod_base = OTHER; note = 2'-O-methyl modified nucleotide
  modified_base 82: mod_base = OTHER; note = 2'-O-methyl modified nucleotide
  modified_base 83: mod_base = OTHER; note = 2'-O-methyl modified nucleotide
  modified_base 84: mod_base = OTHER; note = 2'-O-methyl modified nucleotide
  modified_base 85: mod_base = OTHER; note = 2'-O-methyl modified nucleotide
  modified_base 86: mod_base = OTHER; note = 2'-O-methyl modified nucleotide
  modified_base 87: mod_base = OTHER; note = 2'-O-methyl modified nucleotide
  modified_base 88: mod_base = OTHER; note = 2'-O-methyl modified nucleotide
  modified_base 89: mod_base = OTHER; note = 2'-O-methyl modified nucleotide
  modified_base 90: mod_base = OTHER; note = 2'-O-methyl modified nucleotide
  modified_base 91: mod_base = OTHER; note = 2'-O-methyl modified nucleotide
  modified_base 92: mod_base = OTHER; note = 2'-O-methyl modified nucleotide
  modified_base 93: mod_base = OTHER; note = 2'-O-methyl modified nucleotide
  modified_base 94: mod_base = OTHER; note = 2'-O-methyl modified nucleotide
  modified_base 95: mod_base = OTHER; note = 2'-O-methyl modified nucleotide
  modified_base 96: mod_base = OTHER; note = 2'-O-methyl modified nucleotide
  modified_base 108: mod_base = OTHER; note = Nucleotide with phosphorothioate linkage
  modified_base 109: mod_base = OTHER; note = 2'-O-methyl modified nucleotide with phosphorothioate linkage
  modified_base 110: mod_base = OTHER; note = 2'-O-methyl modified nucleotide with phosphorothioate linkage
  modified_base 111: mod_base = OTHER; note = 2'-O-methyl modified nucleotide
gctggtacacggcagggtcagttttagagctagaaatagcaagttaaaataaggctagtccgttatcaacttgaaaaagtggcaccgagtcggtgcatccagaccctgccg

SEQ ID NO: 16559 - RNA, 118 nt, synthetic construct
  source 1..118: mol_type = other RNA
  modified_base 1: mod_base = OTHER; note = 2'-O-methyl modified nucleotide with phosphorothioate linkage
  modified_base 2: mod_base = OTHER; note = 2'-O-methyl modified nucleotide with phosphorothioate linkage
  modified_base 3: mod_base = OTHER; note = 2'-O-methyl modified nucleotide with phosphorothioate linkage
  modified_base 29: mod_base = OTHER; note = 2'-O-methyl modified nucleotide
  modified_base 30: mod_base = OTHER; note = 2'-O-methyl modified nucleotide
  modified_base 31: mod_base = OTHER; note = 2'-O-methyl modified nucleotide
  modified_base 32: mod_base = OTHER; note = 2'-O-methyl modified nucleotide
  modified_base 33: mod_base = OTHER; note = 2'-O-methyl modified nucleotide
  modified_base 34: mod_base = OTHER; note = 2'-O-methyl modified nucleotide
  modified_base 35: mod_base = OTHER; note = 2'-O-methyl modified nucleotide
  modified_base 36: mod_base = OTHER; note = 2'-O-methyl modified nucleotide
  modified_base 37: mod_base = OTHER; note = 2'-O-methyl modified nucleotide
  modified_base 38: mod_base = OTHER; note = 2'-O-methyl modified nucleotide
  modified_base 39: mod_base = OTHER; note = 2'-O-methyl modified nucleotide
  modified_base 40: mod_base = OTHER; note = 2'-O-methyl modified nucleotide
  modified_base 69: mod_base = OTHER; note = 2'-O-methyl modified nucleotide
  modified_base 70: mod_base = OTHER; note = 2'-O-methyl modified nucleotide
  modified_base 71: mod_base = OTHER; note = 2'-O-methyl modified nucleotide
  modified_base 72: mod_base = OTHER; note = 2'-O-methyl modified nucleotide
  modified_base 73: mod_base = OTHER; note = 2'-O-methyl modified nucleotide
  modified_base 74: mod_base = OTHER; note = 2'-O-methyl modified nucleotide
  modified_base 75: mod_base = OTHER; note = 2'-O-methyl modified nucleotide
  modified_base 76: mod_base = OTHER; note = 2'-O-methyl modified nucleotide
  modified_base 77: mod_base = OTHER; note = 2'-O-methyl modified nucleotide
  modified_base 78: mod_base = OTHER; note = 2'-O-methyl modified nucleotide
  modified_base 79: mod_base = OTHER; note = 2'-O-methyl modified nucleotide
  modified_base 80: mod_base = OTHER; note = 2'-O-methyl modified nucleotide
  modified_base 81: mod_base = OTHER; note = 2'-O-methyl modified nucleotide
  modified_base 82: mod_base = OTHER; note = 2'-O-methyl modified nucleotide
  modified_base 83: mod_base = OTHER; note = 2'-O-methyl modified nucleotide
  modified_base 84: mod_base = OTHER; note = 2'-O-methyl modified nucleotide
  modified_base 85: mod_base = OTHER; note = 2'-O-methyl modified nucleotide
  modified_base 86: mod_base = OTHER; note = 2'-O-methyl modified nucleotide
  modified_base 87: mod_base = OTHER; note = 2'-O-methyl modified nucleotide
  modified_base 88: mod_base = OTHER; note = 2'-O-methyl modified nucleotide
  modified_base 89: mod_base = OTHER; note = 2'-O-methyl modified nucleotide
  modified_base 90: mod_base = OTHER; note = 2'-O-methyl modified nucleotide
  modified_base 91: mod_base = OTHER; note = 2'-O-methyl modified nucleotide
  modified_base 92: mod_base = OTHER; note = 2'-O-methyl modified nucleotide
  modified_base 93: mod_base = OTHER; note = 2'-O-methyl modified nucleotide
  modified_base 94: mod_base = OTHER; note = 2'-O-methyl modified nucleotide
  modified_base 95: mod_base = OTHER; note = 2'-O-methyl modified nucleotide
  modified_base 96: mod_base = OTHER; note = 2'-O-methyl modified nucleotide
  modified_base 115: mod_base = OTHER; note = Nucleotide with phosphorothioate linkage
  modified_base 116: mod_base = OTHER; note = 2'-O-methyl modified nucleotide with phosphorothioate linkage
  modified_base 117: mod_base = OTHER; note = 2'-O-methyl modified nucleotide with phosphorothioate linkage
  modified_base 118: mod_base = OTHER; note = 2'-O-methyl modified nucleotide
gctggtacacggcagggtcagttttagagctagaaatagcaagttaaaataaggctagtccgttatcaacttgaaaaagtggcaccgagtcggtgcatatccagaccctgccgtgtac

SEQ ID NO: 16560 - RNA, 117 nt, synthetic construct
  source 1..117: mol_type = other RNA
  modified_base 1: mod_base = OTHER; note = 2'-O-methyl modified nucleotide with phosphorothioate linkage
  modified_base 2: mod_base = OTHER; note = 2'-O-methyl modified nucleotide with phosphorothioate linkage
  modified_base 3: mod_base = OTHER; note = 2'-O-methyl modified nucleotide with phosphorothioate linkage
  modified_base 29: mod_base = OTHER; note = 2'-O-methyl modified nucleotide
  modified_base 30: mod_base = OTHER; note = 2'-O-methyl modified nucleotide
  modified_base 31: mod_base = OTHER; note = 2'-O-methyl modified nucleotide
  modified_base 32: mod_base = OTHER; note = 2'-O-methyl modified nucleotide
  modified_base 33: mod_base = OTHER; note = 2'-O-methyl modified nucleotide
  modified_base 34: mod_base = OTHER; note = 2'-O-methyl modified nucleotide
  modified_base 35: mod_base = OTHER; note = 2'-O-methyl modified nucleotide
  modified_base 36: mod_base = OTHER; note = 2'-O-methyl modified nucleotide
  modified_base 37: mod_base = OTHER; note = 2'-O-methyl modified nucleotide
  modified_base 38: mod_base = OTHER; note = 2'-O-methyl modified nucleotide
  modified_base 39: mod_base = OTHER; note = 2'-O-methyl modified nucleotide
  modified_base 40: mod_base = OTHER; note = 2'-O-methyl modified nucleotide
  modified_base 69: mod_base = OTHER; note = 2'-O-methyl modified nucleotide
  modified_base 70: mod_base = OTHER; note = 2'-O-methyl modified nucleotide
  modified_base 71: mod_base = OTHER; note = 2'-O-methyl modified nucleotide
  modified_base 72: mod_base = OTHER; note = 2'-O-methyl modified nucleotide
  modified_base 73: mod_base = OTHER; note = 2'-O-methyl modified nucleotide
  modified_base 74: mod_base = OTHER; note = 2'-O-methyl modified nucleotide
  modified_base 75: mod_base = OTHER; note = 2'-O-methyl modified nucleotide
  modified_base 76: mod_base = OTHER; note = 2'-O-methyl modified nucleotide
  modified_base 77: mod_base = OTHER; note = 2'-O-methyl modified nucleotide
  modified_base 78: mod_base = OTHER; note = 2'-O-methyl modified nucleotide
  modified_base 79: mod_base = OTHER; note = 2'-O-methyl modified nucleotide
  modified_base 80: mod_base = OTHER; note = 2'-O-methyl modified nucleotide
  modified_base 81: mod_base = OTHER; note = 2'-O-methyl modified nucleotide
  modified_base 82: mod_base = OTHER; note = 2'-O-methyl modified nucleotide
  modified_base 83: mod_base = OTHER; note = 2'-O-methyl modified nucleotide
  modified_base 84: mod_base = OTHER; note = 2'-O-methyl modified nucleotide
  modified_base 85: mod_base = OTHER; note = 2'-O-methyl modified nucleotide
  modified_base 86: mod_base = OTHER; note = 2'-O-methyl modified nucleotide
  modified_base 87: mod_base = OTHER; note = 2'-O-methyl modified nucleotide
  modified_base 88: mod_base = OTHER; note = 2'-O-methyl modified nucleotide
  modified_base 89: mod_base = OTHER; note = 2'-O-methyl modified nucleotide
  modified_base 90: mod_base = OTHER; note = 2'-O-methyl modified nucleotide
  modified_base 91: mod_base = OTHER; note = 2'-O-methyl modified nucleotide
  modified_base 92: mod_base = OTHER; note = 2'-O-methyl modified nucleotide
  modified_base 93: mod_base = OTHER; note = 2'-O-methyl modified nucleotide
  modified_base 94: mod_base = OTHER; note = 2'-O-methyl modified nucleotide
  modified_base 95: mod_base = OTHER; note = 2'-O-methyl modified nucleotide
  modified_base 96: mod_base = OTHER; note = 2'-O-methyl modified nucleotide
  modified_base 114: mod_base = OTHER; note = Nucleotide with phosphorothioate linkage
  modified_base 115: mod_base = OTHER; note = 2'-O-methyl modified nucleotide with phosphorothioate linkage
  modified_base 116: mod_base = OTHER; note = 2'-O-methyl modified nucleotide with phosphorothioate linkage
  modified_base 117: mod_base = OTHER; note = 2'-O-methyl modified nucleotide
gctggtacacggcagggtcagttttagagctagaaatagcaagttaaaataaggctagtccgttatcaacttgaaaaagtggcaccgagtcggtgcatatccagaccctgccgtgta

SEQ ID NO: 16561 - RNA, 116 nt, synthetic construct
  source 1..116: mol_type = other RNA
  modified_base 1: mod_base = OTHER; note = 2'-O-methyl modified nucleotide with phosphorothioate linkage
  modified_base 2: mod_base = OTHER; note = 2'-O-methyl modified nucleotide with phosphorothioate linkage
  modified_base 3: mod_base = OTHER; note = 2'-O-methyl modified nucleotide with phosphorothioate linkage
  modified_base 29: mod_base = OTHER; note = 2'-O-methyl modified nucleotide
  modified_base 30: mod_base = OTHER; note = 2'-O-methyl modified nucleotide
  modified_base 31: mod_base = OTHER; note = 2'-O-methyl modified nucleotide
  modified_base 32: mod_base = OTHER; note = 2'-O-methyl modified nucleotide
  modified_base 33: mod_base = OTHER; note = 2'-O-methyl modified nucleotide
  modified_base 34: mod_base = OTHER; note = 2'-O-methyl modified nucleotide
  modified_base 35: mod_base = OTHER; note = 2'-O-methyl modified nucleotide
  modified_base 36: mod_base = OTHER; note = 2'-O-methyl modified nucleotide
  modified_base 37: mod_base = OTHER; note = 2'-O-methyl modified nucleotide
  modified_base 38: mod_base = OTHER; note = 2'-O-methyl modified nucleotide
  modified_base 39: mod_base = OTHER; note = 2'-O-methyl modified nucleotide
  modified_base 40: mod_base = OTHER; note = 2'-O-methyl modified nucleotide
  modified_base 69: mod_base = OTHER; note = 2'-O-methyl modified nucleotide
  modified_base 70: mod_base = OTHER; note = 2'-O-methyl modified nucleotide
  modified_base 71: mod_base = OTHER; note = 2'-O-methyl modified nucleotide
  modified_base 72: mod_base = OTHER; note = 2'-O-methyl modified nucleotide
  modified_base 73: mod_base = OTHER; note = 2'-O-methyl modified nucleotide
  modified_base 74: mod_base = OTHER; note = 2'-O-methyl modified nucleotide
  modified_base 75: mod_base = OTHER; note = 2'-O-methyl modified nucleotide
  modified_base 76: mod_base = OTHER; note = 2'-O-methyl modified nucleotide
  modified_base 77: mod_base = OTHER; note = 2'-O-methyl modified nucleotide
  modified_base 78: mod_base = OTHER; note = 2'-O-methyl modified nucleotide
  modified_base 79: mod_base = OTHER; note = 2'-O-methyl modified nucleotide
  modified_base 80: mod_base = OTHER; note = 2'-O-methyl modified nucleotide
  modified_base 81: mod_base = OTHER; note = 2'-O-methyl modified nucleotide
  modified_base 82: mod_base = OTHER; note = 2'-O-methyl modified nucleotide
  modified_base 83: mod_base = OTHER; note = 2'-O-methyl modified nucleotide
  modified_base 84: mod_base = OTHER; note = 2'-O-methyl modified nucleotide
  modified_base 85: mod_base = OTHER; note = 2'-O-methyl modified nucleotide
  modified_base 86: mod_base = OTHER; note = 2'-O-methyl modified nucleotide
  modified_base 87: mod_base = OTHER; note = 2'-O-methyl modified nucleotide
  modified_base 88: mod_base = OTHER; note = 2'-O-methyl modified nucleotide
  modified_base 89: mod_base = OTHER; note = 2'-O-methyl modified nucleotide
  modified_base 90: mod_base = OTHER; note = 2'-O-methyl modified nucleotide
  modified_base 91: mod_base = OTHER; note = 2'-O-methyl modified nucleotide
  modified_base 92: mod_base = OTHER; note = 2'-O-methyl modified nucleotide
  modified_base 93: mod_base = OTHER; note = 2'-O-methyl modified nucleotide
  modified_base 94: mod_base = OTHER; note = 2'-O-methyl modified nucleotide
  modified_base 95: mod_base = OTHER; note = 2'-O-methyl modified nucleotide
  modified_base 96: mod_base = OTHER; note = 2'-O-methyl modified nucleotide
  modified_base 113: mod_base = OTHER; note = Nucleotide with phosphorothioate linkage
  modified_base 114: mod_base = OTHER; note = 2'-O-methyl modified nucleotide with phosphorothioate linkage
  modified_base 115: mod_base = OTHER; note = 2'-O-methyl modified nucleotide with phosphorothioate linkage
  modified_base 116: mod_base = OTHER; note = 2'-O-methyl modified nucleotide
gctggtacacggcagggtcagttttagagctagaaatagcaagttaaaataaggctagtccgttatcaacttgaaaaagtggcaccgagtcggtgcatatccagaccctgccgtgt

SEQ ID NO: 16562 - RNA, 115 nt, synthetic construct
  source 1..115: mol_type = other RNA
  modified_base 1: mod_base = OTHER; note = 2'-O-methyl modified nucleotide with phosphorothioate linkage
  modified_base 2: mod_base = OTHER; note = 2'-O-methyl modified nucleotide with phosphorothioate linkage
  modified_base 3: mod_base = OTHER; note = 2'-O-methyl modified nucleotide with phosphorothioate linkage
  modified_base 29: mod_base = OTHER; note = 2'-O-methyl modified nucleotide
  modified_base 30: mod_base = OTHER; note = 2'-O-methyl modified nucleotide
  modified_base 31: mod_base = OTHER; note = 2'-O-methyl modified nucleotide
  modified_base 32: mod_base = OTHER; note = 2'-O-methyl modified nucleotide
  modified_base 33: mod_base = OTHER; note = 2'-O-methyl modified nucleotide
  modified_base 34: mod_base = OTHER; note = 2'-O-methyl modified nucleotide
  modified_base 35: mod_base = OTHER; note = 2'-O-methyl modified nucleotide
  modified_base 36: mod_base = OTHER; note = 2'-O-methyl modified nucleotide
  modified_base 37: mod_base = OTHER; note = 2'-O-methyl modified nucleotide
  modified_base 38: mod_base = OTHER; note = 2'-O-methyl modified nucleotide
  modified_base 39: mod_base = OTHER; note = 2'-O-methyl modified nucleotide
  modified_base 40: mod_base = OTHER; note = 2'-O-methyl modified nucleotide
  modified_base 69: mod_base = OTHER; note = 2'-O-methyl modified nucleotide
  modified_base 70: mod_base = OTHER; note = 2'-O-methyl modified nucleotide
  modified_base 71: mod_base = OTHER; note = 2'-O-methyl modified nucleotide
  modified_base 72: mod_base = OTHER; note = 2'-O-methyl modified nucleotide
  modified_base 73: mod_base = OTHER; note = 2'-O-methyl modified nucleotide
  modified_base 74: mod_base = OTHER; note = 2'-O-methyl modified nucleotide
  modified_base 75: mod_base = OTHER; note = 2'-O-methyl modified nucleotide
  modified_base 76: mod_base = OTHER; note = 2'-O-methyl modified nucleotide
  modified_base 77: mod_base = OTHER; note = 2'-O-methyl modified nucleotide
  modified_base 78: mod_base = OTHER; note = 2'-O-methyl modified nucleotide
  modified_base 79: mod_base = OTHER; note = 2'-O-methyl modified nucleotide
  modified_base 80: mod_base = OTHER; note = 2'-O-methyl modified nucleotide
  modified_base 81: mod_base = OTHER; note = 2'-O-methyl modified nucleotide
  modified_base 82: mod_base = OTHER; note = 2'-O-methyl modified nucleotide
  modified_base 83: mod_base = OTHER; note = 2'-O-methyl modified nucleotide
  modified_base 84: mod_base = OTHER; note = 2'-O-methyl modified nucleotide
  modified_base 85: mod_base = OTHER; note = 2'-O-methyl modified nucleotide
  modified_base 86: mod_base = OTHER; note = 2'-O-methyl modified nucleotide
  modified_base 87: mod_base = OTHER; note = 2'-O-methyl modified nucleotide
  modified_base 88: mod_base = OTHER; note = 2'-O-methyl modified nucleotide
  modified_base 89: mod_base = OTHER; note = 2'-O-methyl modified nucleotide
  modified_base 90: mod_base = OTHER; note = 2'-O-methyl modified nucleotide
  modified_base 91: mod_base = OTHER; note = 2'-O-methyl modified nucleotide
  modified_base 92: mod_base = OTHER; note = 2'-O-methyl modified nucleotide
  modified_base 93: mod_base = OTHER; note = 2'-O-methyl modified nucleotide
  modified_base 94: mod_base = OTHER; note = 2'-O-methyl modified nucleotide
  modified_base 95: mod_base = OTHER; note = 2'-O-methyl modified nucleotide
  modified_base 96: mod_base = OTHER; note = 2'-O-methyl modified nucleotide
  modified_base 112: mod_base = OTHER; note = Nucleotide with phosphorothioate linkage
  modified_base 113: mod_base = OTHER; note = 2'-O-methyl modified nucleotide with phosphorothioate linkage
  modified_base 114: mod_base = OTHER; note = 2'-O-methyl modified nucleotide with phosphorothioate linkage
  modified_base 115: mod_base = OTHER; note = 2'-O-methyl modified nucleotide
gctggtacacggcagggtcagttttagagctagaaatagcaagttaaaataaggctagtccgttatcaacttgaaaaagtggcaccgagtcggtgcatatccagaccctgccgtg

SEQ ID NO: 16563 - RNA, 114 nt, synthetic construct
  source 1..114: mol_type = other RNA
  modified_base 1: mod_base = OTHER; note = 2'-O-methyl modified nucleotide with phosphorothioate linkage
  modified_base 2: mod_base = OTHER; note = 2'-O-methyl modified nucleotide with phosphorothioate linkage
  modified_base 3: mod_base = OTHER; note = 2'-O-methyl modified nucleotide with phosphorothioate linkage
  modified_base 29: mod_base = OTHER; note = 2'-O-methyl modified nucleotide
  modified_base 30: mod_base = OTHER; note = 2'-O-methyl modified nucleotide
  modified_base 31: mod_base = OTHER; note = 2'-O-methyl modified nucleotide
  modified_base 32: mod_base = OTHER; note = 2'-O-methyl modified nucleotide
  modified_base 33: mod_base = OTHER; note = 2'-O-methyl modified nucleotide
  modified_base 34: mod_base = OTHER; note = 2'-O-methyl modified nucleotide
  modified_base 35: mod_base = OTHER; note = 2'-O-methyl modified nucleotide
  modified_base 36: mod_base = OTHER; note = 2'-O-methyl modified nucleotide
  modified_base 37: mod_base = OTHER; note = 2'-O-methyl modified nucleotide
  modified_base 38: mod_base = OTHER; note = 2'-O-methyl modified nucleotide
  modified_base 39: mod_base = OTHER; note = 2'-O-methyl modified nucleotide
  modified_base 40: mod_base = OTHER; note = 2'-O-methyl modified nucleotide
  modified_base 69: mod_base = OTHER; note = 2'-O-methyl modified nucleotide
  modified_base 70: mod_base = OTHER; note = 2'-O-methyl modified nucleotide
  modified_base 71: mod_base = OTHER; note = 2'-O-methyl modified nucleotide
  modified_base 72: mod_base = OTHER; note = 2'-O-methyl modified nucleotide
  modified_base 73: mod_base = OTHER; note = 2'-O-methyl modified nucleotide
  modified_base 74: mod_base = OTHER; note = 2'-O-methyl modified nucleotide
  modified_base 75: mod_base = OTHER; note = 2'-O-methyl modified nucleotide
  modified_base 76: mod_base = OTHER; note = 2'-O-methyl modified nucleotide
  modified_base 77: mod_base = OTHER; note = 2'-O-methyl modified nucleotide
  modified_base 78: mod_base = OTHER; note = 2'-O-methyl modified nucleotide
  modified_base 79: mod_base = OTHER; note = 2'-O-methyl modified nucleotide
  modified_base 80: mod_base = OTHER; note = 2'-O-methyl modified nucleotide
  modified_base 81: mod_base = OTHER; note = 2'-O-methyl modified nucleotide
  modified_base 82: mod_base = OTHER; note = 2'-O-methyl modified nucleotide
  modified_base 83: mod_base = OTHER; note = 2'-O-methyl modified nucleotide
  modified_base 84: mod_base = OTHER; note = 2'-O-methyl modified nucleotide
  modified_base 85: mod_base = OTHER; note = 2'-O-methyl modified nucleotide
  modified_base 86: mod_base = OTHER; note = 2'-O-methyl modified nucleotide
  modified_base 87: mod_base = OTHER; note = 2'-O-methyl modified nucleotide
  modified_base 88: mod_base = OTHER; note = 2'-O-methyl modified nucleotide
  modified_base 89: mod_base = OTHER; note = 2'-O-methyl modified nucleotide
  modified_base 90: mod_base = OTHER; note = 2'-O-methyl modified nucleotide
  modified_base 91: mod_base = OTHER; note = 2'-O-methyl modified nucleotide
  modified_base 92: mod_base = OTHER; note = 2'-O-methyl modified nucleotide
  modified_base 93: mod_base = OTHER; note = 2'-O-methyl modified nucleotide
  modified_base 94: mod_base = OTHER; note = 2'-O-methyl modified nucleotide
  modified_base 95: mod_base = OTHER; note = 2'-O-methyl modified nucleotide
  modified_base 96: mod_base = OTHER; note = 2'-O-methyl modified nucleotide
  modified_base 111: mod_base = OTHER; note = Nucleotide with phosphorothioate linkage
  modified_base 112: mod_base = OTHER; note = 2'-O-methyl modified nucleotide with phosphorothioate linkage
  modified_base 113: mod_base = OTHER; note = 2'-O-methyl modified nucleotide with phosphorothioate linkage
  modified_base 114: mod_base = OTHER; note = 2'-O-methyl modified nucleotide
gctggtacacggcagggtcagttttagagctagaaatagcaagttaaaataaggctagtccgttatcaacttgaaaaagtggcaccgagtcggtgcatatccagaccctgccgt

SEQ ID NO: 16564 - RNA, 113 nt, synthetic construct
  source 1..113: mol_type = other RNA
  modified_base 1: mod_base = OTHER; note = 2'-O-methyl modified nucleotide with phosphorothioate linkage
  modified_base 2: mod_base = OTHER; note = 2'-O-methyl modified nucleotide with phosphorothioate linkage
  modified_base 3: mod_base = OTHER; note = 2'-O-methyl modified nucleotide with phosphorothioate linkage
  modified_base 29: mod_base = OTHER; note = 2'-O-methyl modified nucleotide
  modified_base 30: mod_base = OTHER; note = 2'-O-methyl modified nucleotide
  modified_base 31: mod_base = OTHER; note = 2'-O-methyl modified nucleotide
  modified_base 32: mod_base = OTHER; note = 2'-O-methyl modified nucleotide
  modified_base 33: mod_base = OTHER; note = 2'-O-methyl modified nucleotide
  modified_base 34: mod_base = OTHER; note = 2'-O-methyl modified nucleotide
  modified_base 35: mod_base = OTHER; note = 2'-O-methyl modified nucleotide
  modified_base 36: mod_base = OTHER; note = 2'-O-methyl modified nucleotide
  modified_base 37: mod_base = OTHER; note = 2'-O-methyl modified nucleotide
  modified_base 38: mod_base = OTHER; note = 2'-O-methyl modified nucleotide
  modified_base 39: mod_base = OTHER; note = 2'-O-methyl modified nucleotide
  modified_base 40: mod_base = OTHER; note = 2'-O-methyl modified nucleotide
  modified_base 69: mod_base = OTHER; note = 2'-O-methyl modified nucleotide
  modified_base 70: mod_base = OTHER; note = 2'-O-methyl modified nucleotide
  modified_base 71: mod_base = OTHER; note = 2'-O-methyl modified nucleotide
  modified_base 72: mod_base = OTHER; note = 2'-O-methyl modified nucleotide
  modified_base 73: mod_base = OTHER; note = 2'-O-methyl modified nucleotide
  modified_base 74: mod_base = OTHER; note = 2'-O-methyl modified nucleotide
  modified_base 75: mod_base = OTHER; note = 2'-O-methyl modified nucleotide
  modified_base 76: mod_base = OTHER; note = 2'-O-methyl modified nucleotide
  modified_base 77: mod_base = OTHER; note = 2'-O-methyl modified nucleotide
  modified_base 78: mod_base = OTHER; note = 2'-O-methyl modified nucleotide
  modified_base 79: mod_base = OTHER; note = 2'-O-methyl modified nucleotide
  modified_base 80: mod_base = OTHER; note = 2'-O-methyl modified nucleotide
  modified_base 81: mod_base = OTHER; note = 2'-O-methyl modified nucleotide
  modified_base 82: mod_base = OTHER; note = 2'-O-methyl modified nucleotide
  modified_base 83: mod_base = OTHER; note = 2'-O-methyl modified nucleotide
  modified_base 84: mod_base = OTHER; note = 2'-O-methyl modified nucleotide
  modified_base 85: mod_base = OTHER; note = 2'-O-methyl modified nucleotide
  modified_base 86: mod_base = OTHER; note = 2'-O-methyl modified nucleotide
  modified_base 87: mod_base = OTHER; note = 2'-O-methyl modified nucleotide
  modified_base 88: mod_base = OTHER; note = 2'-O-methyl modified nucleotide
  modified_base 89: mod_base = OTHER; note = 2'-O-methyl modified nucleotide
  modified_base 90: mod_base = OTHER; note = 2'-O-methyl modified nucleotide
  modified_base 91: mod_base = OTHER; note = 2'-O-methyl modified nucleotide
  modified_base 92: mod_base = OTHER; note = 2'-O-methyl modified nucleotide
  modified_base 93: mod_base = OTHER; note = 2'-O-methyl modified nucleotide
  modified_base 94: mod_base = OTHER; note = 2'-O-methyl modified nucleotide
  modified_base 95: mod_base = OTHER; note = 2'-O-methyl modified nucleotide
  modified_base 96: mod_base = OTHER; note = 2'-O-methyl modified nucleotide
  modified_base 110: mod_base = OTHER; note = Nucleotide with phosphorothioate linkage
  modified_base 111: mod_base = OTHER; note = 2'-O-methyl modified nucleotide with phosphorothioate linkage
  modified_base 112: mod_base = OTHER; note = 2'-O-methyl modified nucleotide with phosphorothioate linkage
  modified_base 113: mod_base = OTHER; note = 2'-O-methyl modified nucleotide
gctggtacacggcagggtcagttttagagctagaaatagcaagttaaaataaggctagtccgttatcaacttgaaaaagtggcaccgagtcggtgcatatccagaccctgccg

SEQ ID NO: 16565 - RNA, 120 nt, synthetic construct
  source 1..120: mol_type = other RNA
  modified_base 1: mod_base = OTHER; note = 2'-O-methyl modified nucleotide with phosphorothioate linkage
  modified_base 2: mod_base = OTHER; note = 2'-O-methyl modified nucleotide with phosphorothioate linkage
  modified_base 3: mod_base = OTHER; note = 2'-O-methyl modified nucleotide with phosphorothioate linkage
  modified_base 29: mod_base = OTHER; note = 2'-O-methyl modified nucleotide
  modified_base 30: mod_base = OTHER; note = 2'-O-methyl modified nucleotide
  modified_base 31: mod_base = OTHER; note = 2'-O-methyl modified nucleotide
  modified_base 32: mod_base = OTHER; note = 2'-O-methyl modified nucleotide
  modified_base 33: mod_base = OTHER; note = 2'-O-methyl modified nucleotide
  modified_base 34: mod_base = OTHER; note = 2'-O-methyl modified nucleotide
  modified_base 35: mod_base = OTHER; note = 2'-O-methyl modified nucleotide
  modified_base 36: mod_base = OTHER; note = 2'-O-methyl modified nucleotide
  modified_base 37: mod_base = OTHER; note = 2'-O-methyl modified nucleotide
  modified_base 38: mod_base = OTHER; note = 2'-O-methyl modified nucleotide
  modified_base 39: mod_base = OTHER; note = 2'-O-methyl modified nucleotide
  modified_base 40: mod_base = OTHER; note = 2'-O-methyl modified nucleotide
  modified_base 69: mod_base = OTHER; note = 2'-O-methyl modified nucleotide
  modified_base 70: mod_base = OTHER; note = 2'-O-methyl modified nucleotide
  modified_base 71: mod_base = OTHER; note = 2'-O-methyl modified nucleotide
  modified_base 72: mod_base = OTHER; note = 2'-O-methyl modified nucleotide
  modified_base 73: mod_base = OTHER; note = 2'-O-methyl modified nucleotide
  modified_base 74: mod_base = OTHER; note = 2'-O-methyl modified nucleotide
  modified_base 75: mod_base = OTHER; note = 2'-O-methyl modified nucleotide
  modified_base 76: mod_base = OTHER; note = 2'-O-methyl modified nucleotide
  modified_base 77: mod_base = OTHER; note = 2'-O-methyl modified nucleotide
  modified_base 78: mod_base = OTHER; note = 2'-O-methyl modified nucleotide
  modified_base 79: mod_base = OTHER; note = 2'-O-methyl modified nucleotide
  modified_base 80: mod_base = OTHER; note = 2'-O-methyl modified nucleotide
  modified_base 81: mod_base = OTHER; note = 2'-O-methyl modified nucleotide
  modified_base 82: mod_base = OTHER; note = 2'-O-methyl modified nucleotide
  modified_base 83: mod_base = OTHER; note = 2'-O-methyl modified nucleotide
  modified_base 84: mod_base = OTHER; note = 2'-O-methyl modified nucleotide
  modified_base 85: mod_base = OTHER; note = 2'-O-methyl modified nucleotide
  modified_base 86: mod_base = OTHER; note = 2'-O-methyl modified nucleotide
  modified_base 87: mod_base = OTHER; note = 2'-O-methyl modified nucleotide
  modified_base 88: mod_base = OTHER; note = 2'-O-methyl modified nucleotide
  modified_base 89: mod_base = OTHER; note = 2'-O-methyl modified nucleotide
  modified_base 90: mod_base = OTHER; note = 2'-O-methyl modified nucleotide
  modified_base 91: mod_base = OTHER; note = 2'-O-methyl modified nucleotide
  modified_base 92: mod_base = OTHER; note = 2'-O-methyl modified nucleotide
  modified_base 93: mod_base = OTHER; note = 2'-O-methyl modified nucleotide
  modified_base 94: mod_base = OTHER; note = 2'-O-methyl modified nucleotide
  modified_base 95: mod_base = OTHER; note = 2'-O-methyl modified nucleotide
  modified_base 96: mod_base = OTHER; note = 2'-O-methyl modified nucleotide
  modified_base 117: mod_base = OTHER; note = Nucleotide with phosphorothioate linkage
  modified_base 118: mod_base = OTHER; note = 2'-O-methyl modified nucleotide with phosphorothioate linkage
  modified_base 119: mod_base = OTHER; note = 2'-O-methyl modified nucleotide with phosphorothioate linkage
  modified_base 120: mod_base = OTHER; note = 2'-O-methyl modified nucleotide
gctggtacacggcagggtcagttttagagctagaaatagcaagttaaaataaggctagtccgttatcaacttgaaaaagtggcaccgagtcggtgcagatatccagaccctgccgtgtac

SEQ ID NO: 16566 - RNA, 119 nt, synthetic construct
  source 1..119: mol_type = other RNA
  modified_base 1: mod_base = OTHER; note = 2'-O-methyl modified nucleotide with phosphorothioate linkage
  modified_base 2: mod_base = OTHER; note = 2'-O-methyl modified nucleotide with phosphorothioate linkage
  modified_base 3: mod_base = OTHER; note = 2'-O-methyl modified nucleotide with phosphorothioate linkage
  modified_base 29: mod_base = OTHER; note = 2'-O-methyl modified nucleotide
  modified_base 30: mod_base = OTHER; note = 2'-O-methyl modified nucleotide
  modified_base 31: mod_base = OTHER; note = 2'-O-methyl modified nucleotide
  modified_base 32: mod_base = OTHER; note = 2'-O-methyl modified nucleotide
  modified_base 33: mod_base = OTHER; note = 2'-O-methyl modified nucleotide
  modified_base 34: mod_base = OTHER; note = 2'-O-methyl modified nucleotide
  modified_base 35: mod_base = OTHER; note = 2'-O-methyl modified nucleotide
  modified_base 36: mod_base = OTHER; note = 2'-O-methyl modified nucleotide
  modified_base 37: mod_base = OTHER; note = 2'-O-methyl modified nucleotide
  modified_base 38: mod_base = OTHER; note = 2'-O-methyl modified nucleotide
  modified_base 39: mod_base = OTHER; note = 2'-O-methyl modified nucleotide
  modified_base 40: mod_base = OTHER; note = 2'-O-methyl modified nucleotide
  modified_base 69: mod_base = OTHER; note = 2'-O-methyl modified nucleotide
  modified_base 70: mod_base = OTHER; note = 2'-O-methyl modified nucleotide
  modified_base 71: mod_base = OTHER; note = 2'-O-methyl modified nucleotide
  modified_base 72: mod_base = OTHER; note = 2'-O-methyl modified nucleotide
  modified_base 73: mod_base = OTHER; note = 2'-O-methyl modified nucleotide
  modified_base 74: mod_base = OTHER; note = 2'-O-methyl modified nucleotide
  modified_base 75: mod_base = OTHER; note = 2'-O-methyl modified nucleotide
  modified_base 76: mod_base = OTHER; note = 2'-O-methyl modified nucleotide
  modified_base 77: mod_base = OTHER; note = 2'-O-methyl modified nucleotide
  modified_base 78: mod_base = OTHER; note = 2'-O-methyl modified nucleotide
  modified_base 79: mod_base = OTHER; note = 2'-O-methyl modified nucleotide
  modified_base 80: mod_base = OTHER; note = 2'-O-methyl modified nucleotide
  modified_base 81: mod_base = OTHER; note = 2'-O-methyl modified nucleotide
  modified_base 82: mod_base = OTHER; note = 2'-O-methyl modified nucleotide
  modified_base 83: mod_base = OTHER; note = 2'-O-methyl modified nucleotide
  modified_base 84: mod_base = OTHER; note = 2'-O-methyl modified nucleotide
  modified_base 85: mod_base = OTHER; note = 2'-O-methyl modified nucleotide
  modified_base 86: mod_base = OTHER; note = 2'-O-methyl modified nucleotide
  modified_base 87: mod_base = OTHER; note = 2'-O-methyl modified nucleotide
  modified_base 88: mod_base = OTHER; note = 2'-O-methyl modified nucleotide
  modified_base 89: mod_base = OTHER; note = 2'-O-methyl modified nucleotide
  modified_base 90: mod_base = OTHER; note = 2'-O-methyl modified nucleotide
  modified_base 91: mod_base = OTHER; note = 2'-O-methyl modified nucleotide
  modified_base 92: mod_base = OTHER; note = 2'-O-methyl modified nucleotide
  modified_base 93: mod_base = OTHER; note = 2'-O-methyl modified nucleotide
  modified_base 94: mod_base = OTHER; note = 2'-O-methyl modified nucleotide
  modified_base 95: mod_base = OTHER; note = 2'-O-methyl modified nucleotide
  modified_base 96: mod_base = OTHER; note = 2'-O-methyl modified nucleotide
  modified_base 116: mod_base = OTHER; note = Nucleotide with phosphorothioate linkage
  modified_base 117: mod_base = OTHER; note = 2'-O-methyl modified nucleotide with phosphorothioate linkage
  modified_base 118: mod_base = OTHER; note = 2'-O-methyl modified nucleotide with phosphorothioate linkage
  modified_base 119: mod_base = OTHER; note = 2'-O-methyl modified nucleotide
gctggtacacggcagggtcagttttagagctagaaatagcaagttaaaataaggctagtccgttatcaacttgaaaaagtggcaccgagtcggtgcagatatccagaccctgccgtgta

SEQ ID NO: 16567 - RNA, 118 nt, synthetic construct
  source 1..118: mol_type = other RNA
  modified_base 1: mod_base = OTHER; note = 2'-O-methyl modified nucleotide with phosphorothioate linkage
  modified_base 2: mod_base = OTHER; note = 2'-O-methyl modified nucleotide with phosphorothioate linkage
  modified_base 3: mod_base = OTHER; note = 2'-O-methyl modified nucleotide with phosphorothioate linkage
  modified_base 29: mod_base = OTHER; note = 2'-O-methyl modified nucleotide
  modified_base 30: mod_base = OTHER; note = 2'-O-methyl modified nucleotide
  modified_base 31: mod_base = OTHER; note = 2'-O-methyl modified nucleotide
  modified_base 32: mod_base = OTHER; note = 2'-O-methyl modified nucleotide
  modified_base 33: mod_base = OTHER; note = 2'-O-methyl modified nucleotide
  modified_base 34: mod_base = OTHER; note = 2'-O-methyl modified nucleotide
  modified_base 35: mod_base = OTHER; note = 2'-O-methyl modified nucleotide
  modified_base 36: mod_base = OTHER; note = 2'-O-methyl modified nucleotide
  modified_base 37: mod_base = OTHER; note = 2'-O-methyl modified nucleotide
  modified_base 38: mod_base = OTHER; note = 2'-O-methyl modified nucleotide
  modified_base 39: mod_base = OTHER; note = 2'-O-methyl modified nucleotide
  modified_base 40: mod_base = OTHER; note = 2'-O-methyl modified nucleotide
  modified_base 69: mod_base = OTHER; note = 2'-O-methyl modified nucleotide
  modified_base 70: mod_base = OTHER; note = 2'-O-methyl modified nucleotide
  modified_base 71: mod_base = OTHER; note = 2'-O-methyl modified nucleotide
  modified_base 72: mod_base = OTHER; note = 2'-O-methyl modified nucleotide
  modified_base 73: mod_base = OTHER; note = 2'-O-methyl modified nucleotide
  modified_base 74: mod_base = OTHER; note = 2'-O-methyl modified nucleotide
  modified_base 75: mod_base = OTHER; note = 2'-O-methyl modified nucleotide
  modified_base 76: mod_base = OTHER; note = 2'-O-methyl modified nucleotide
  modified_base 77: mod_base = OTHER; note = 2'-O-methyl modified nucleotide
  modified_base 78: mod_base = OTHER; note = 2'-O-methyl modified nucleotide
  modified_base 79: mod_base = OTHER; note = 2'-O-methyl modified nucleotide
  modified_base 80: mod_base = OTHER; note = 2'-O-methyl modified nucleotide
  modified_base 81: mod_base = OTHER; note = 2'-O-methyl modified nucleotide
  modified_base 82: mod_base = OTHER; note = 2'-O-methyl modified nucleotide
  modified_base 83: mod_base = OTHER; note = 2'-O-methyl modified nucleotide
  modified_base 84: mod_base = OTHER; note = 2'-O-methyl modified nucleotide
  modified_base 85: mod_base = OTHER; note = 2'-O-methyl modified nucleotide
  modified_base 86: mod_base = OTHER; note = 2'-O-methyl modified nucleotide
  modified_base 87: mod_base = OTHER; note = 2'-O-methyl modified nucleotide
  modified_base 88: mod_base = OTHER; note = 2'-O-methyl modified nucleotide
  modified_base 89: mod_base = OTHER; note = 2'-O-methyl modified nucleotide
  modified_base 90: mod_base = OTHER; note = 2'-O-methyl modified nucleotide
  modified_base 91: mod_base = OTHER; note = 2'-O-methyl modified nucleotide
  modified_base 92: mod_base = OTHER; note = 2'-O-methyl modified nucleotide
  modified_base 93: mod_base = OTHER; note = 2'-O-methyl modified nucleotide
  modified_base 94: mod_base = OTHER; note = 2'-O-methyl modified nucleotide
  modified_base 95: mod_base = OTHER; note = 2'-O-methyl modified nucleotide
  modified_base 96: mod_base = OTHER; note = 2'-O-methyl modified nucleotide
  modified_base 115: mod_base = OTHER; note = Nucleotide with phosphorothioate linkage
  modified_base 116: mod_base = OTHER; note = 2'-O-methyl modified nucleotide with phosphorothioate linkage
  modified_base 117: mod_base = OTHER; note = 2'-O-methyl modified nucleotide with phosphorothioate linkage
  modified_base 118: mod_base = OTHER; note = 2'-O-methyl modified nucleotide
gctggtacacggcagggtcagttttagagctagaaatagcaagttaaaataaggctagtccgttatcaacttgaaaaagtggcaccgagtcggtgcagatatccagaccctgccgtgt

SEQ ID NO: 16568 - RNA, 117 nt, synthetic construct
  source 1..117: mol_type = other RNA
  modified_base 1: mod_base = OTHER; note = 2'-O-methyl modified nucleotide with phosphorothioate linkage
  modified_base 2: mod_base = OTHER; note = 2'-O-methyl modified nucleotide with phosphorothioate linkage
  modified_base 3: mod_base = OTHER; note = 2'-O-methyl modified nucleotide with phosphorothioate linkage
  modified_base 29: mod_base = OTHER; note = 2'-O-methyl modified nucleotide
  modified_base 30: mod_base = OTHER; note = 2'-O-methyl modified nucleotide
  modified_base 31: mod_base = OTHER; note = 2'-O-methyl modified nucleotide
  modified_base 32: mod_base = OTHER; note = 2'-O-methyl modified nucleotide
  modified_base 33: mod_base = OTHER; note = 2'-O-methyl modified nucleotide
  modified_base 34: mod_base = OTHER; note = 2'-O-methyl modified nucleotide
  modified_base 35: mod_base = OTHER; note = 2'-O-methyl modified nucleotide
  modified_base 36: mod_base = OTHER; note = 2'-O-methyl modified nucleotide
  modified_base 37: mod_base = OTHER; note = 2'-O-methyl modified nucleotide
  modified_base 38: mod_base = OTHER; note = 2'-O-methyl modified nucleotide
  modified_base 39: mod_base = OTHER; note = 2'-O-methyl modified nucleotide
  modified_base 40: mod_base = OTHER; note = 2'-O-methyl modified nucleotide
  modified_base 69: mod_base = OTHER; note = 2'-O-methyl modified nucleotide
  modified_base 70: mod_base = OTHER; note = 2'-O-methyl modified nucleotide
  modified_base 71: mod_base = OTHER; note = 2'-O-methyl modified nucleotide
  modified_base 72: mod_base = OTHER; note = 2'-O-methyl modified nucleotide
  modified_base 73: mod_base = OTHER; note = 2'-O-methyl modified nucleotide
  modified_base 74: mod_base = OTHER; note = 2'-O-methyl modified nucleotide
  modified_base 75: mod_base = OTHER; note = 2'-O-methyl modified nucleotide
  modified_base 76: mod_base = OTHER; note = 2'-O-methyl modified nucleotide
  modified_base 77: mod_base = OTHER; note = 2'-O-methyl modified nucleotide
  modified_base 78: mod_base = OTHER; note = 2'-O-methyl modified nucleotide
  modified_base 79: mod_base = OTHER; note = 2'-O-methyl modified nucleotide
  modified_base 80: mod_base = OTHER; note = 2'-O-methyl modified nucleotide
  modified_base 81: mod_base = OTHER; note = 2'-O-methyl modified nucleotide
  modified_base 82: mod_base = OTHER; note = 2'-O-methyl modified nucleotide
  modified_base 83: mod_base = OTHER; note = 2'-O-methyl modified nucleotide
  modified_base 84: mod_base = OTHER; note = 2'-O-methyl modified nucleotide
  modified_base 85: mod_base = OTHER; note = 2'-O-methyl modified nucleotide
  modified_base 86: mod_base = OTHER; note = 2'-O-methyl modified nucleotide
  modified_base 87: mod_base = OTHER; note = 2'-O-methyl modified nucleotide
  modified_base 88: mod_base = OTHER; note = 2'-O-methyl modified nucleotide
  modified_base 89: mod_base = OTHER; note = 2'-O-methyl modified nucleotide
  modified_base 90: mod_base = OTHER; note = 2'-O-methyl modified nucleotide
  modified_base 91: mod_base = OTHER; note = 2'-O-methyl modified nucleotide
  modified_base 92: mod_base = OTHER; note = 2'-O-methyl modified nucleotide
  modified_base 93: mod_base = OTHER; note = 2'-O-methyl modified nucleotide
  modified_base 94: mod_base = OTHER; note = 2'-O-methyl modified nucleotide
  modified_base 95: mod_base = OTHER; note = 2'-O-methyl modified nucleotide
  modified_base 96: mod_base = OTHER; note = 2'-O-methyl modified nucleotide
  modified_base 114: mod_base = OTHER; note = Nucleotide with phosphorothioate linkage
  modified_base 115: mod_base = OTHER; note = 2'-O-methyl modified nucleotide with phosphorothioate linkage
  modified_base 116: mod_base = OTHER; note = 2'-O-methyl modified nucleotide with phosphorothioate linkage
  modified_base 117: mod_base = OTHER; note = 2'-O-methyl modified nucleotide
gctggtacacggcagggtcagttttagagctagaaatagcaagttaaaataaggctagtccgttatcaacttgaaaaagtggcaccgagtcggtgcagatatccagaccctgccgtg

SEQ ID NO: 16569 - RNA, 116 nt, synthetic construct
  source 1..116: mol_type = other RNA
  modified_base 1: mod_base = OTHER; note = 2'-O-methyl modified nucleotide with phosphorothioate linkage
  modified_base 2: mod_base = OTHER; note = 2'-O-methyl modified nucleotide with phosphorothioate linkage
  modified_base 3: mod_base = OTHER; note = 2'-O-methyl modified nucleotide with phosphorothioate linkage
  modified_base 29: mod_base = OTHER; note = 2'-O-methyl modified nucleotide
  modified_base 30: mod_base = OTHER; note = 2'-O-methyl modified nucleotide
  modified_base 31: mod_base = OTHER; note = 2'-O-methyl modified nucleotide
  modified_base 32: mod_base = OTHER; note = 2'-O-methyl modified nucleotide
  modified_base 33: mod_base = OTHER; note = 2'-O-methyl modified nucleotide
  modified_base 34: mod_base = OTHER; note = 2'-O-methyl modified nucleotide
  modified_base 35: mod_base = OTHER; note = 2'-O-methyl modified nucleotide
  modified_base 36: mod_base = OTHER; note = 2'-O-methyl modified nucleotide
  modified_base 37: mod_base = OTHER; note = 2'-O-methyl modified nucleotide
  modified_base 38: mod_base = OTHER; note = 2'-O-methyl modified nucleotide
  modified_base 39: mod_base = OTHER; note = 2'-O-methyl modified nucleotide
  modified_base 40: mod_base = OTHER; note = 2'-O-methyl modified nucleotide
  modified_base 69: mod_base = OTHER; note = 2'-O-methyl modified nucleotide
  modified_base 70: mod_base = OTHER; note = 2'-O-methyl modified nucleotide
  modified_base 71: mod_base = OTHER; note = 2'-O-methyl modified nucleotide
  modified_base 72: mod_base = OTHER; note = 2'-O-methyl modified nucleotide
  modified_base 73: mod_base = OTHER; note = 2'-O-methyl modified nucleotide
  modified_base 74: mod_base = OTHER; note = 2'-O-methyl modified nucleotide
  modified_base 75: mod_base = OTHER; note = 2'-O-methyl modified nucleotide
  modified_base 76: mod_base = OTHER; note = 2'-O-methyl modified nucleotide
  modified_base 77: mod_base = OTHER; note = 2'-O-methyl modified nucleotide
  modified_base 78: mod_base = OTHER; note = 2'-O-methyl modified nucleotide
  modified_base 79: mod_base = OTHER; note = 2'-O-methyl modified nucleotide
  modified_base 80: mod_base = OTHER; note = 2'-O-methyl modified nucleotide
  modified_base 81: mod_base = OTHER; note = 2'-O-methyl modified nucleotide
  modified_base 82: mod_base = OTHER; note = 2'-O-methyl modified nucleotide
  modified_base 83: mod_base = OTHER; note = 2'-O-methyl modified nucleotide
  modified_base 84: mod_base = OTHER; note = 2'-O-methyl modified nucleotide
  modified_base 85: mod_base = OTHER; note = 2'-O-methyl modified nucleotide
  modified_base 86: mod_base = OTHER; note = 2'-O-methyl modified nucleotide
  modified_base 87: mod_base = OTHER; note = 2'-O-methyl modified nucleotide
  modified_base 88: mod_base = OTHER; note = 2'-O-methyl modified nucleotide
  modified_base 89: mod_base = OTHER; note = 2'-O-methyl modified nucleotide
  modified_base 90: mod_base = OTHER; note = 2'-O-methyl modified nucleotide
  modified_base 91: mod_base = OTHER; note = 2'-O-methyl modified nucleotide
  modified_base 92: mod_base = OTHER; note = 2'-O-methyl modified nucleotide
  modified_base 93: mod_base = OTHER; note = 2'-O-methyl modified nucleotide
  modified_base 94: mod_base = OTHER; note = 2'-O-methyl modified nucleotide
  modified_base 95: mod_base = OTHER; note = 2'-O-methyl modified nucleotide
  modified_base 96: mod_base = OTHER; note = 2'-O-methyl modified nucleotide
  modified_base 113: mod_base = OTHER; note = Nucleotide with phosphorothioate linkage
  modified_base 114: mod_base = OTHER; note = 2'-O-methyl modified nucleotide with phosphorothioate linkage
  modified_base 115: mod_base = OTHER; note = 2'-O-methyl modified nucleotide with phosphorothioate linkage
  modified_base 116: mod_base = OTHER; note = 2'-O-methyl modified nucleotide
gctggtacacggcagggtcagttttagagctagaaatagcaagttaaaataaggctagtccgttatcaacttgaaaaagtggcaccgagtcggtgcagatatccagaccctgccgt

SEQ ID NO: 16570 - RNA, 115 nt, synthetic construct
  source 1..115: mol_type = other RNA
  modified_base 1: mod_base = OTHER; note = 2'-O-methyl modified nucleotide with phosphorothioate linkage
  modified_base 2: mod_base = OTHER; note = 2'-O-methyl modified nucleotide with phosphorothioate linkage
  modified_base 3: mod_base = OTHER; note = 2'-O-methyl modified nucleotide with phosphorothioate linkage
  modified_base 29: mod_base = OTHER; note = 2'-O-methyl modified nucleotide
  modified_base 30: mod_base = OTHER; note = 2'-O-methyl modified nucleotide
  modified_base 31: mod_base = OTHER; note = 2'-O-methyl modified nucleotide
  modified_base 32: mod_base = OTHER; note = 2'-O-methyl modified nucleotide
  modified_base 33: mod_base = OTHER; note = 2'-O-methyl modified nucleotide
  modified_base 34: mod_base = OTHER; note = 2'-O-methyl modified nucleotide
  modified_base 35: mod_base = OTHER; note = 2'-O-methyl modified nucleotide
  modified_base 36: mod_base = OTHER; note = 2'-O-methyl modified nucleotide
  modified_base 37: mod_base = OTHER; note = 2'-O-methyl modified nucleotide
  modified_base 38: mod_base = OTHER; note = 2'-O-methyl modified nucleotide
  modified_base 39: mod_base = OTHER; note = 2'-O-methyl modified nucleotide
  modified_base 40: mod_base = OTHER; note = 2'-O-methyl modified nucleotide
  modified_base 69: mod_base = OTHER; note = 2'-O-methyl modified nucleotide
  modified_base 70: mod_base = OTHER; note = 2'-O-methyl modified nucleotide
  modified_base 71: mod_base = OTHER; note = 2'-O-methyl modified nucleotide
  modified_base 72: mod_base = OTHER; note = 2'-O-methyl modified nucleotide
  modified_base 73: mod_base = OTHER; note = 2'-O-methyl modified nucleotide
  modified_base 74: mod_base = OTHER; note = 2'-O-methyl modified nucleotide
  modified_base 75: mod_base = OTHER; note = 2'-O-methyl modified nucleotide
  modified_base 76: mod_base = OTHER; note = 2'-O-methyl modified nucleotide
  modified_base 77: mod_base = OTHER; note = 2'-O-methyl modified nucleotide
  modified_base 78: mod_base = OTHER; note = 2'-O-methyl modified nucleotide
  modified_base 79: mod_base = OTHER; note = 2'-O-methyl modified nucleotide
  modified_base 80: mod_base = OTHER; note = 2'-O-methyl modified nucleotide
  modified_base 81: mod_base = OTHER; note = 2'-O-methyl modified nucleotide
  modified_base 82: mod_base = OTHER; note = 2'-O-methyl modified nucleotide
  modified_base 83: mod_base = OTHER; note = 2'-O-methyl modified nucleotide
  modified_base 84: mod_base = OTHER; note = 2'-O-methyl modified nucleotide
  modified_base 85: mod_base = OTHER; note = 2'-O-methyl modified nucleotide
  modified_base 86: mod_base = OTHER; note = 2'-O-methyl modified nucleotide
  modified_base 87: mod_base = OTHER; note = 2'-O-methyl modified nucleotide
  modified_base 88: mod_base = OTHER; note = 2'-O-methyl modified nucleotide
  modified_base 89: mod_base = OTHER; note = 2'-O-methyl modified nucleotide
  modified_base 90: mod_base = OTHER; note = 2'-O-methyl modified nucleotide
  modified_base 91: mod_base = OTHER; note = 2'-O-methyl modified nucleotide
  modified_base 92: mod_base = OTHER; note = 2'-O-methyl modified nucleotide
  modified_base 93: mod_base = OTHER; note = 2'-O-methyl modified nucleotide
  modified_base 94: mod_base = OTHER; note = 2'-O-methyl modified nucleotide
  modified_base 95: mod_base = OTHER; note = 2'-O-methyl modified nucleotide
  modified_base 96: mod_base = OTHER; note = 2'-O-methyl modified nucleotide
  modified_base 112: mod_base = OTHER; note = Nucleotide with phosphorothioate linkage
  modified_base 113: mod_base = OTHER; note = 2'-O-methyl modified nucleotide with phosphorothioate linkage
  modified_base 114: mod_base = OTHER; note = 2'-O-methyl modified nucleotide with phosphorothioate linkage
  modified_base 115: mod_base = OTHER; note = 2'-O-methyl modified nucleotide
gctggtacacggcagggtcagttttagagctagaaatagcaagttaaaataaggctagtccgttatcaacttgaaaaagtggcaccgagtcggtgcagatatccagaccctgccg

SEQ ID NO: 16571 - RNA, 122 nt, synthetic construct
  source 1..122: mol_type = other RNA
  modified_base 1: mod_base = OTHER; note = 2'-O-methyl modified nucleotide with phosphorothioate linkage
  modified_base 2: mod_base = OTHER; note = 2'-O-methyl modified nucleotide with phosphorothioate linkage
  modified_base 3: mod_base = OTHER; note = 2'-O-methyl modified nucleotide with phosphorothioate linkage
  modified_base 29: mod_base = OTHER; note = 2'-O-methyl modified nucleotide
  modified_base 30: mod_base = OTHER; note = 2'-O-methyl modified nucleotide
  modified_base 31: mod_base = OTHER; note = 2'-O-methyl modified nucleotide
  modified_base 32: mod_base = OTHER; note = 2'-O-methyl modified nucleotide
  modified_base 33: mod_base = OTHER; note = 2'-O-methyl modified nucleotide
  modified_base 34: mod_base = OTHER; note = 2'-O-methyl modified nucleotide
  modified_base 35: mod_base = OTHER; note = 2'-O-methyl modified nucleotide
  modified_base 36: mod_base = OTHER; note = 2'-O-methyl modified nucleotide
  modified_base 37: mod_base = OTHER; note = 2'-O-methyl modified nucleotide
  modified_base 38: mod_base = OTHER; note = 2'-O-methyl modified nucleotide
  modified_base 39: mod_base = OTHER; note = 2'-O-methyl modified nucleotide
  modified_base 40: mod_base = OTHER; note = 2'-O-methyl modified nucleotide
  modified_base 69: mod_base = OTHER; note = 2'-O-methyl modified nucleotide
  modified_base 70: mod_base = OTHER; note = 2'-O-methyl modified nucleotide
  modified_base 71: mod_base = OTHER; note = 2'-O-methyl modified nucleotide
  modified_base 72: mod_base = OTHER; note = 2'-O-methyl modified nucleotide
  modified_base 73: mod_base = OTHER; note = 2'-O-methyl modified nucleotide
  modified_base 74: mod_base = OTHER; note = 2'-O-methyl modified nucleotide
  modified_base 75: mod_base = OTHER; note = 2'-O-methyl modified nucleotide
  modified_base 76: mod_base = OTHER; note = 2'-O-methyl modified nucleotide
  modified_base 77: mod_base = OTHER; note = 2'-O-methyl modified nucleotide
  modified_base 78: mod_base = OTHER; note = 2'-O-methyl modified nucleotide
  modified_base 79: mod_base = OTHER; note = 2'-O-methyl modified nucleotide
  modified_base 80: mod_base = OTHER; note = 2'-O-methyl modified nucleotide
  modified_base 81: mod_base = OTHER; note = 2'-O-methyl modified nucleotide
  modified_base 82: mod_base = OTHER; note = 2'-O-methyl modified nucleotide
  modified_base 83: mod_base = OTHER; note = 2'-O-methyl modified nucleotide
  modified_base 84: mod_base = OTHER; note = 2'-O-methyl modified nucleotide
  modified_base 85: mod_base = OTHER; note = 2'-O-methyl modified nucleotide
  modified_base 86: mod_base = OTHER; note = 2'-O-methyl modified nucleotide
  modified_base 87: mod_base = OTHER; note = 2'-O-methyl modified nucleotide
  modified_base 88: mod_base = OTHER; note = 2'-O-methyl modified nucleotide
  modified_base 89: mod_base = OTHER; note = 2'-O-methyl modified nucleotide
  modified_base 90: mod_base = OTHER; note = 2'-O-methyl modified nucleotide
  modified_base 91: mod_base = OTHER; note = 2'-O-methyl modified nucleotide
  modified_base 92: mod_base = OTHER; note = 2'-O-methyl modified nucleotide
  modified_base 93: mod_base = OTHER; note = 2'-O-methyl modified nucleotide
  modified_base 94: mod_base = OTHER; note = 2'-O-methyl modified nucleotide
  modified_base 95: mod_base = OTHER; note = 2'-O-methyl modified nucleotide
  modified_base 96: mod_base = OTHER; note = 2'-O-methyl modified nucleotide
  modified_base 119: mod_base = OTHER; note = Nucleotide with phosphorothioate linkage
  modified_base 120: mod_base = OTHER; note = 2'-O-methyl modified nucleotide with phosphorothioate linkage
  modified_base 121: mod_base = OTHER; note = 2'-O-methyl modified nucleotide with phosphorothioate linkage
  modified_base 122: mod_base = OTHER; note = 2'-O-methyl modified nucleotide
gctggtacacggcagggtcagttttagagctagaaatagcaagttaaaataaggctagtccgttatcaacttgaaaaagtggcaccgagtcggtgcacagatatccagaccctgccgtgtac

SEQ ID NO: 16572 - RNA, 121 nt, synthetic construct
  source 1..121: mol_type = other RNA
  modified_base 1: mod_base = OTHER; note = 2'-O-methyl modified nucleotide with phosphorothioate linkage
  modified_base 2: mod_base = OTHER; note = 2'-O-methyl modified nucleotide with phosphorothioate linkage
  modified_base 3: mod_base = OTHER; note = 2'-O-methyl modified nucleotide with phosphorothioate linkage
  modified_base 29: mod_base = OTHER; note = 2'-O-methyl modified nucleotide
  modified_base 30: mod_base = OTHER; note = 2'-O-methyl modified nucleotide
  modified_base 31: mod_base = OTHER; note = 2'-O-methyl modified nucleotide
  modified_base 32: mod_base = OTHER; note = 2'-O-methyl modified nucleotide
  modified_base 33: mod_base = OTHER; note = 2'-O-methyl modified nucleotide
  modified_base 34: mod_base = OTHER; note = 2'-O-methyl modified nucleotide
  modified_base 35: mod_base = OTHER; note = 2'-O-methyl modified nucleotide
  modified_base 36: mod_base = OTHER; note = 2'-O-methyl modified nucleotide
  modified_base 37: mod_base = OTHER; note = 2'-O-methyl modified nucleotide
  modified_base 38: mod_base = OTHER; note = 2'-O-methyl modified nucleotide
  modified_base 39: mod_base = OTHER; note = 2'-O-methyl modified nucleotide
  modified_base 40: mod_base = OTHER; note = 2'-O-methyl modified nucleotide
  modified_base 69: mod_base = OTHER; note = 2'-O-methyl modified nucleotide
  modified_base 70: mod_base = OTHER; note = 2'-O-methyl modified nucleotide
  modified_base 71: mod_base = OTHER; note = 2'-O-methyl modified nucleotide
  modified_base 72: mod_base = OTHER; note = 2'-O-methyl modified nucleotide
  modified_base 73: mod_base = OTHER; note = 2'-O-methyl modified nucleotide
  modified_base 74: mod_base = OTHER; note = 2'-O-methyl modified nucleotide
  modified_base 75: mod_base = OTHER; note = 2'-O-methyl modified nucleotide
  modified_base 76: mod_base = OTHER; note = 2'-O-methyl modified nucleotide
  modified_base 77: mod_base = OTHER; note = 2'-O-methyl modified nucleotide
  modified_base 78: mod_base = OTHER; note = 2'-O-methyl modified nucleotide
  modified_base 79: mod_base = OTHER; note = 2'-O-methyl modified nucleotide
  modified_base 80: mod_base = OTHER; note = 2'-O-methyl modified nucleotide
  modified_base 81: mod_base = OTHER; note = 2'-O-methyl modified nucleotide
  modified_base 82: mod_base = OTHER; note = 2'-O-methyl modified nucleotide
  modified_base 83: mod_base = OTHER; note = 2'-O-methyl modified nucleotide
  modified_base 84: mod_base = OTHER; note = 2'-O-methyl modified nucleotide
  modified_base 85: mod_base = OTHER; note = 2'-O-methyl modified nucleotide
  modified_base 86: mod_base = OTHER; note = 2'-O-methyl modified nucleotide
  modified_base 87: mod_base = OTHER; note = 2'-O-methyl modified nucleotide
  modified_base 88: mod_base = OTHER; note = 2'-O-methyl modified nucleotide
  modified_base 89: mod_base = OTHER; note = 2'-O-methyl modified nucleotide
  modified_base 90: mod_base = OTHER; note = 2'-O-methyl modified nucleotide
  modified_base 91: mod_base = OTHER; note = 2'-O-methyl modified nucleotide
  modified_base 92: mod_base = OTHER; note = 2'-O-methyl modified nucleotide
  modified_base 93: mod_base = OTHER; note = 2'-O-methyl modified nucleotide
  modified_base 94: mod_base = OTHER; note = 2'-O-methyl modified nucleotide
  modified_base 95: mod_base = OTHER; note = 2'-O-methyl modified nucleotide
  modified_base 96: mod_base = OTHER; note = 2'-O-methyl modified nucleotide
  modified_base 118: mod_base = OTHER; note = Nucleotide with phosphorothioate linkage
  modified_base 119: mod_base = OTHER; note = 2'-O-methyl modified nucleotide with phosphorothioate linkage
  modified_base 120: mod_base = OTHER; note = 2'-O-methyl modified nucleotide with phosphorothioate linkage
  modified_base 121: mod_base = OTHER; note = 2'-O-methyl modified nucleotide
gctggtacacggcagggtcagttttagagctagaaatagcaagttaaaataaggctagtccgttatcaacttgaaaaagtggcaccgagtcggtgcacagatatccagaccctgccgtgta

SEQ ID NO: 16573 - RNA, 120 nt, synthetic construct
  source 1..120: mol_type = other RNA
  modified_base 1: mod_base = OTHER; note = 2'-O-methyl modified nucleotide with phosphorothioate linkage
  modified_base 2: mod_base = OTHER; note = 2'-O-methyl modified nucleotide with phosphorothioate linkage
  modified_base 3: mod_base = OTHER; note = 2'-O-methyl modified nucleotide with phosphorothioate linkage
  modified_base 29: mod_base = OTHER; note = 2'-O-methyl modified nucleotide
  modified_base 30: mod_base = OTHER; note = 2'-O-methyl modified nucleotide
  modified_base 31: mod_base = OTHER; note = 2'-O-methyl modified nucleotide
  modified_base 32: mod_base = OTHER; note = 2'-O-methyl modified nucleotide
  modified_base 33: mod_base = OTHER; note = 2'-O-methyl modified nucleotide
  modified_base 34: mod_base = OTHER; note = 2'-O-methyl modified nucleotide
  modified_base 35: mod_base = OTHER; note = 2'-O-methyl modified nucleotide
  modified_base 36: mod_base = OTHER; note = 2'-O-methyl modified nucleotide
  modified_base 37: mod_base = OTHER; note = 2'-O-methyl modified nucleotide
  modified_base 38: mod_base = OTHER; note = 2'-O-methyl modified nucleotide
  modified_base 39: mod_base = OTHER; note = 2'-O-methyl modified nucleotide
  modified_base 40: mod_base = OTHER; note = 2'-O-methyl modified nucleotide
  modified_base 69: mod_base = OTHER; note = 2'-O-methyl modified nucleotide
  modified_base 70: mod_base = OTHER; note = 2'-O-methyl modified nucleotide
  modified_base 71: mod_base = OTHER; note = 2'-O-methyl modified nucleotide
  modified_base 72: mod_base = OTHER; note = 2'-O-methyl modified nucleotide
  modified_base 73: mod_base = OTHER; note = 2'-O-methyl modified nucleotide
  modified_base 74: mod_base = OTHER; note = 2'-O-methyl modified nucleotide
  modified_base 75: mod_base = OTHER; note = 2'-O-methyl modified nucleotide
  modified_base 76: mod_base = OTHER; note = 2'-O-methyl modified nucleotide
  modified_base 77: mod_base = OTHER; note = 2'-O-methyl modified nucleotide
  modified_base 78: mod_base = OTHER; note = 2'-O-methyl modified nucleotide
  modified_base 79: mod_base = OTHER; note = 2'-O-methyl modified nucleotide
  modified_base 80: mod_base = OTHER; note = 2'-O-methyl modified nucleotide
  modified_base 81: mod_base = OTHER; note = 2'-O-methyl modified nucleotide
  modified_base 82: mod_base = OTHER; note = 2'-O-methyl modified nucleotide
  modified_base 83: mod_base = OTHER; note = 2'-O-methyl modified nucleotide
  modified_base 84: mod_base = OTHER; note = 2'-O-methyl modified nucleotide
  modified_base 85: mod_base = OTHER; note = 2'-O-methyl modified nucleotide
  modified_base 86: mod_base = OTHER; note = 2'-O-methyl modified nucleotide
  modified_base 87: mod_base = OTHER; note = 2'-O-methyl modified nucleotide
  modified_base 88: mod_base = OTHER; note = 2'-O-methyl modified nucleotide
  modified_base 89: mod_base = OTHER; note = 2'-O-methyl modified nucleotide
  modified_base 90: mod_base = OTHER; note = 2'-O-methyl modified nucleotide
  modified_base 91: mod_base = OTHER; note = 2'-O-methyl modified nucleotide
  modified_base 92: mod_base = OTHER; note = 2'-O-methyl modified nucleotide
  modified_base 93: mod_base = OTHER; note = 2'-O-methyl modified nucleotide
  modified_base 94: mod_base = OTHER; note = 2'-O-methyl modified nucleotide
  modified_base 95: mod_base = OTHER; note = 2'-O-methyl modified nucleotide
  modified_base 96: mod_base = OTHER; note = 2'-O-methyl modified nucleotide
  modified_base 117: mod_base = OTHER; note = Nucleotide with phosphorothioate linkage
  modified_base 118: mod_base = OTHER; note = 2'-O-methyl modified nucleotide with phosphorothioate linkage
  modified_base 119: mod_base = OTHER; note = 2'-O-methyl modified nucleotide with phosphorothioate linkage
  modified_base 120: mod_base = OTHER; note = 2'-O-methyl modified nucleotide
gctggtacacggcagggtcagttttagagctagaaatagcaagttaaaataaggctagtccgttatcaacttgaaaaagtggcaccgagtcggtgcacagatatccagaccctgccgtgt

SEQ ID NO: 16574 - RNA, 119 nt, synthetic construct
  source 1..119: mol_type = other RNA
  modified_base 1: mod_base = OTHER; note = 2'-O-methyl modified nucleotide with phosphorothioate linkage
  modified_base 2: mod_base = OTHER; note = 2'-O-methyl modified nucleotide with phosphorothioate linkage
  modified_base 3: mod_base = OTHER; note = 2'-O-methyl modified nucleotide with phosphorothioate linkage
  modified_base 29: mod_base = OTHER; note = 2'-O-methyl modified nucleotide
  modified_base 30: mod_base = OTHER; note = 2'-O-methyl modified nucleotide
  modified_base 31: mod_base = OTHER; note = 2'-O-methyl modified nucleotide
  modified_base 32: mod_base = OTHER; note = 2'-O-methyl modified nucleotide
  modified_base 33: mod_base = OTHER; note = 2'-O-methyl modified nucleotide
  modified_base 34: mod_base = OTHER; note = 2'-O-methyl modified nucleotide
  modified_base 35: mod_base = OTHER; note = 2'-O-methyl modified nucleotide
  modified_base 36: mod_base = OTHER; note = 2'-O-methyl modified nucleotide
  modified_base 37: mod_base = OTHER; note = 2'-O-methyl modified nucleotide
  modified_base 38: mod_base = OTHER; note = 2'-O-methyl modified nucleotide
  modified_base 39: mod_base = OTHER; note = 2'-O-methyl modified nucleotide
  modified_base 40: mod_base = OTHER; note = 2'-O-methyl modified nucleotide
  modified_base 69: mod_base = OTHER; note = 2'-O-methyl modified nucleotide
  modified_base 70: mod_base = OTHER; note = 2'-O-methyl modified nucleotide
  modified_base 71: mod_base = OTHER; note = 2'-O-methyl modified nucleotide
  modified_base 72: mod_base = OTHER; note = 2'-O-methyl modified nucleotide
  modified_base 73: mod_base = OTHER; note = 2'-O-methyl modified nucleotide
  modified_base 74: mod_base = OTHER; note = 2'-O-methyl modified nucleotide
  modified_base 75: mod_base = OTHER; note = 2'-O-methyl modified nucleotide
  modified_base 76: mod_base = OTHER; note = 2'-O-methyl modified nucleotide
  modified_base 77: mod_base = OTHER; note = 2'-O-methyl modified nucleotide
  modified_base 78: mod_base = OTHER; note = 2'-O-methyl modified nucleotide
  modified_base 79: mod_base = OTHER; note = 2'-O-methyl modified nucleotide
  modified_base 80: mod_base = OTHER; note = 2'-O-methyl modified nucleotide
  modified_base 81: mod_base = OTHER; note = 2'-O-methyl modified nucleotide
  modified_base 82: mod_base = OTHER; note = 2'-O-methyl modified nucleotide
  modified_base 83: mod_base = OTHER; note = 2'-O-methyl modified nucleotide
  modified_base 84: mod_base = OTHER; note = 2'-O-methyl modified nucleotide
  modified_base 85: mod_base = OTHER; note = 2'-O-methyl modified nucleotide
  modified_base 86: mod_base = OTHER; note = 2'-O-methyl modified nucleotide
  modified_base 87: mod_base = OTHER; note = 2'-O-methyl modified nucleotide
  modified_base 88: mod_base = OTHER; note = 2'-O-methyl modified nucleotide
  modified_base 89: mod_base = OTHER; note = 2'-O-methyl modified nucleotide
  modified_base 90: mod_base = OTHER; note = 2'-O-methyl modified nucleotide
  modified_base 91: mod_base = OTHER; note = 2'-O-methyl modified nucleotide
  modified_base 92: mod_base = OTHER; note = 2'-O-methyl modified nucleotide
  modified_base 93: mod_base = OTHER; note = 2'-O-methyl modified nucleotide
  modified_base 94: mod_base = OTHER; note = 2'-O-methyl modified nucleotide
  modified_base 95: mod_base = OTHER; note = 2'-O-methyl modified nucleotide
  modified_base 96: mod_base = OTHER; note = 2'-O-methyl modified nucleotide
  modified_base 116: mod_base = OTHER; note = Nucleotide with phosphorothioate linkage
  modified_base 117: mod_base = OTHER; note = 2'-O-methyl modified nucleotide with phosphorothioate linkage
  modified_base 118: mod_base = OTHER; note = 2'-O-methyl modified nucleotide with phosphorothioate linkage
  modified_base 119: mod_base = OTHER; note = 2'-O-methyl modified nucleotide
gctggtacacggcagggtcagttttagagctagaaatagcaagttaaaataaggctagtccgttatcaacttgaaaaagtggcaccgagtcggtgcacagatatccagaccctgccgtg

SEQ ID NO: 16575 - RNA, 118 nt, synthetic construct
  source 1..118: mol_type = other RNA
  modified_base 1: mod_base = OTHER; note = 2'-O-methyl modified nucleotide with phosphorothioate linkage
  modified_base 2: mod_base = OTHER; note = 2'-O-methyl modified nucleotide with phosphorothioate linkage
  modified_base 3: mod_base = OTHER; note = 2'-O-methyl modified nucleotide with phosphorothioate linkage
  modified_base 29: mod_base = OTHER; note = 2'-O-methyl modified nucleotide
  modified_base 30: mod_base = OTHER; note = 2'-O-methyl modified nucleotide
  modified_base 31: mod_base = OTHER; note = 2'-O-methyl modified nucleotide
  modified_base 32: mod_base = OTHER; note = 2'-O-methyl modified nucleotide
  modified_base 33: mod_base = OTHER; note = 2'-O-methyl modified nucleotide
  modified_base 34: mod_base = OTHER; note = 2'-O-methyl modified nucleotide
  modified_base 35: mod_base = OTHER; note = 2'-O-methyl modified nucleotide
  modified_base 36: mod_base = OTHER; note = 2'-O-methyl modified nucleotide
  modified_base 37: mod_base = OTHER; note = 2'-O-methyl modified nucleotide
  modified_base 38: mod_base = OTHER; note = 2'-O-methyl modified nucleotide
  modified_base 39: mod_base = OTHER; note = 2'-O-methyl modified nucleotide
  modified_base 40: mod_base = OTHER; note = 2'-O-methyl modified nucleotide
  modified_base 69: mod_base = OTHER; note = 2'-O-methyl modified nucleotide
  modified_base 70: mod_base = OTHER; note = 2'-O-methyl modified nucleotide
  modified_base 71: mod_base = OTHER; note = 2'-O-methyl modified nucleotide
  modified_base 72: mod_base = OTHER; note = 2'-O-methyl modified nucleotide
  modified_base 73: mod_base = OTHER; note = 2'-O-methyl modified nucleotide
  modified_base 74: mod_base = OTHER; note = 2'-O-methyl modified nucleotide
  modified_base 75: mod_base = OTHER; note = 2'-O-methyl modified nucleotide
  modified_base 76: mod_base = OTHER; note = 2'-O-methyl modified nucleotide
  modified_base 77: mod_base = OTHER; note = 2'-O-methyl modified nucleotide
  modified_base 78: mod_base = OTHER; note = 2'-O-methyl modified nucleotide
  modified_base 79: mod_base = OTHER; note = 2'-O-methyl modified nucleotide
  modified_base 80: mod_base = OTHER; note = 2'-O-methyl modified nucleotide
  modified_base 81: mod_base = OTHER; note = 2'-O-methyl modified nucleotide
  modified_base 82: mod_base = OTHER; note = 2'-O-methyl modified nucleotide
  modified_base 83: mod_base = OTHER; note = 2'-O-methyl modified nucleotide
  modified_base 84: mod_base = OTHER; note = 2'-O-methyl modified nucleotide
  modified_base 85: mod_base = OTHER; note = 2'-O-methyl modified nucleotide
  modified_base 86: mod_base = OTHER; note = 2'-O-methyl modified nucleotide
  modified_base 87: mod_base = OTHER; note = 2'-O-methyl modified nucleotide
  modified_base 88: mod_base = OTHER; note = 2'-O-methyl modified nucleotide
  modified_base 89: mod_base = OTHER; note = 2'-O-methyl modified nucleotide
  modified_base 90: mod_base = OTHER; note = 2'-O-methyl modified nucleotide
  modified_base 91: mod_base = OTHER; note = 2'-O-methyl modified nucleotide
  modified_base 92: mod_base = OTHER; note = 2'-O-methyl modified nucleotide
  modified_base 93: mod_base = OTHER; note = 2'-O-methyl modified nucleotide
  modified_base 94: mod_base = OTHER; note = 2'-O-methyl modified nucleotide
  modified_base 95: mod_base = OTHER; note = 2'-O-methyl modified nucleotide
  modified_base 96: mod_base = OTHER; note = 2'-O-methyl modified nucleotide
  modified_base 115: mod_base = OTHER; note = Nucleotide with phosphorothioate linkage
  modified_base 116: mod_base = OTHER; note = 2'-O-methyl modified nucleotide with phosphorothioate linkage
  modified_base 117: mod_base = OTHER; note = 2'-O-methyl modified nucleotide with phosphorothioate linkage
  modified_base 118: mod_base = OTHER; note = 2'-O-methyl modified nucleotide
gctggtacacggcagggtcagttttagagctagaaatagcaagttaaaataaggctagtccgttatcaacttgaaaaagtggcaccgagtcggtgcacagatatccagaccctgccgt

SEQ ID NO: 16576 - RNA, 117 nt, synthetic construct
  source 1..117: mol_type = other RNA
  modified_base 1: mod_base = OTHER; note = 2'-O-methyl modified nucleotide with phosphorothioate linkage
  modified_base 2: mod_base = OTHER; note = 2'-O-methyl modified nucleotide with phosphorothioate linkage
  modified_base 3: mod_base = OTHER; note = 2'-O-methyl modified nucleotide with phosphorothioate linkage
  modified_base 29: mod_base = OTHER; note = 2'-O-methyl modified nucleotide
  modified_base 30: mod_base = OTHER; note = 2'-O-methyl modified nucleotide
  modified_base 31: mod_base = OTHER; note = 2'-O-methyl modified nucleotide
  modified_base 32: mod_base = OTHER; note = 2'-O-methyl modified nucleotide
  modified_base 33: mod_base = OTHER; note = 2'-O-methyl modified nucleotide
  modified_base 34: mod_base = OTHER; note = 2'-O-methyl modified nucleotide
  modified_base 35: mod_base = OTHER; note = 2'-O-methyl modified nucleotide
  modified_base 36: mod_base = OTHER; note = 2'-O-methyl modified nucleotide
  modified_base 37: mod_base = OTHER; note = 2'-O-methyl modified nucleotide
  modified_base 38: mod_base = OTHER; note = 2'-O-methyl modified nucleotide
  modified_base 39: mod_base = OTHER; note = 2'-O-methyl modified nucleotide
  modified_base 40: mod_base = OTHER; note = 2'-O-methyl modified nucleotide
  modified_base 69: mod_base = OTHER; note = 2'-O-methyl modified nucleotide
  modified_base 70: mod_base = OTHER; note = 2'-O-methyl modified nucleotide
  modified_base 71: mod_base = OTHER; note = 2'-O-methyl modified nucleotide
  modified_base 72: mod_base = OTHER; note = 2'-O-methyl modified nucleotide
  modified_base 73: mod_base = OTHER; note = 2'-O-methyl modified nucleotide
  modified_base 74: mod_base = OTHER; note = 2'-O-methyl modified nucleotide
  modified_base 75: mod_base = OTHER; note = 2'-O-methyl modified nucleotide
  modified_base 76: mod_base = OTHER; note = 2'-O-methyl modified nucleotide
  modified_base 77: mod_base = OTHER; note = 2'-O-methyl modified nucleotide
  modified_base 78: mod_base = OTHER; note = 2'-O-methyl modified nucleotide
  modified_base 79: mod_base = OTHER; note = 2'-O-methyl modified nucleotide
  modified_base 80: mod_base = OTHER; note = 2'-O-methyl modified nucleotide
  modified_base 81: mod_base = OTHER; note = 2'-O-methyl modified nucleotide
  modified_base 82: mod_base = OTHER; note = 2'-O-methyl modified nucleotide
  modified_base 83: mod_base = OTHER; note = 2'-O-methyl modified nucleotide
  modified_base 84: mod_base = OTHER; note = 2'-O-methyl modified nucleotide
  modified_base 85: mod_base = OTHER; note = 2'-O-methyl modified nucleotide
  modified_base 86: mod_base = OTHER; note = 2'-O-methyl modified nucleotide
  modified_base 87: mod_base = OTHER; note = 2'-O-methyl modified nucleotide
  modified_base 88: mod_base = OTHER; note = 2'-O-methyl modified nucleotide
  modified_base 89: mod_base = OTHER; note = 2'-O-methyl modified nucleotide
  modified_base 90: mod_base = OTHER; note = 2'-O-methyl modified nucleotide
  modified_base 91: mod_base = OTHER; note = 2'-O-methyl modified nucleotide
  modified_base 92: mod_base = OTHER; note = 2'-O-methyl modified nucleotide
  modified_base 93: mod_base = OTHER; note = 2'-O-methyl modified nucleotide
  modified_base 94: mod_base = OTHER; note = 2'-O-methyl modified nucleotide
  modified_base 95: mod_base = OTHER; note = 2'-O-methyl modified nucleotide
  modified_base 96: mod_base = OTHER; note = 2'-O-methyl modified nucleotide
  modified_base 114: mod_base = OTHER; note = Nucleotide with phosphorothioate linkage
  modified_base 115: mod_base = OTHER; note = 2'-O-methyl modified nucleotide with phosphorothioate linkage
  modified_base 116: mod_base = OTHER; note = 2'-O-methyl modified nucleotide with phosphorothioate linkage
  modified_base 117: mod_base = OTHER; note = 2'-O-methyl modified nucleotide
gctggtacacggcagggtcagttttagagctagaaatagcaagttaaaataaggctagtccgttatcaacttgaaaaagtggcaccgagtcggtgcacagatatccagaccctgccg

SEQ ID NO: 16577 - RNA, 124 nt, synthetic construct
  source 1..124: mol_type = other RNA
  modified_base 1: mod_base = OTHER; note = 2'-O-methyl modified nucleotide with phosphorothioate linkage
  modified_base 2: mod_base = OTHER; note = 2'-O-methyl modified nucleotide with phosphorothioate linkage
  modified_base 3: mod_base = OTHER; note = 2'-O-methyl modified nucleotide with phosphorothioate linkage
  modified_base 29: mod_base = OTHER; note = 2'-O-methyl modified nucleotide
  modified_base 30: mod_base = OTHER; note = 2'-O-methyl modified nucleotide
  modified_base 31: mod_base = OTHER; note = 2'-O-methyl modified nucleotide
  modified_base 32: mod_base = OTHER; note = 2'-O-methyl modified nucleotide
  modified_base 33: mod_base = OTHER; note = 2'-O-methyl modified nucleotide
  modified_base 34: mod_base = OTHER; note = 2'-O-methyl modified nucleotide
  modified_base 35: mod_base = OTHER; note = 2'-O-methyl modified nucleotide
  modified_base 36: mod_base = OTHER; note = 2'-O-methyl modified nucleotide
  modified_base 37: mod_base = OTHER; note = 2'-O-methyl modified nucleotide
  modified_base 38: mod_base = OTHER; note = 2'-O-methyl modified nucleotide
  modified_base 39: mod_base = OTHER; note = 2'-O-methyl modified nucleotide
  modified_base 40: mod_base = OTHER; note = 2'-O-methyl modified nucleotide
  modified_base 69: mod_base = OTHER; note = 2'-O-methyl modified nucleotide
  modified_base 70: mod_base = OTHER; note = 2'-O-methyl modified nucleotide
  modified_base 71: mod_base = OTHER; note = 2'-O-methyl modified nucleotide
  modified_base 72: mod_base = OTHER; note = 2'-O-methyl modified nucleotide
  modified_base 73: mod_base = OTHER; note = 2'-O-methyl modified nucleotide
  modified_base 74: mod_base = OTHER; note = 2'-O-methyl modified nucleotide
  modified_base 75: mod_base = OTHER; note = 2'-O-methyl modified nucleotide
  modified_base 76: mod_base = OTHER; note = 2'-O-methyl modified nucleotide
  modified_base 77: mod_base = OTHER; note = 2'-O-methyl modified nucleotide
  modified_base 78: mod_base = OTHER; note = 2'-O-methyl modified nucleotide
  modified_base 79: mod_base = OTHER; note = 2'-O-methyl modified nucleotide
  modified_base 80: mod_base = OTHER; note = 2'-O-methyl modified nucleotide
  modified_base 81: mod_base = OTHER; note = 2'-O-methyl modified nucleotide
  modified_base 82: mod_base = OTHER; note = 2'-O-methyl modified nucleotide
  modified_base 83: mod_base = OTHER; note = 2'-O-methyl modified nucleotide
  modified_base 84: mod_base = OTHER; note = 2'-O-methyl modified nucleotide
  modified_base 85: mod_base = OTHER; note = 2'-O-methyl modified nucleotide
  modified_base 86: mod_base = OTHER; note = 2'-O-methyl modified nucleotide
  modified_base 87: mod_base = OTHER; note = 2'-O-methyl modified nucleotide
  modified_base 88: mod_base = OTHER; note = 2'-O-methyl modified nucleotide
  modified_base 89: mod_base = OTHER; note = 2'-O-methyl modified nucleotide
  modified_base 90: mod_base = OTHER; note = 2'-O-methyl modified nucleotide
  modified_base 91: mod_base = OTHER; note = 2'-O-methyl modified nucleotide
  modified_base 92: mod_base = OTHER; note = 2'-O-methyl modified nucleotide
  modified_base 93: mod_base = OTHER; note = 2'-O-methyl modified nucleotide
  modified_base 94: mod_base = OTHER; note = 2'-O-methyl modified nucleotide
  modified_base 95: mod_base = OTHER; note = 2'-O-methyl modified nucleotide
  modified_base 96: mod_base = OTHER; note = 2'-O-methyl modified nucleotide
  modified_base 121: mod_base = OTHER; note = Nucleotide with phosphorothioate linkage
  modified_base 122: mod_base = OTHER; note = 2'-O-methyl modified nucleotide with phosphorothioate linkage
  modified_base 123: mod_base = OTHER; note = 2'-O-methyl modified nucleotide with phosphorothioate linkage
  modified_base 124: mod_base = OTHER; note = 2'-O-methyl modified nucleotide
gctggtacacggcagggtcagttttagagctagaaatagcaagttaaaataaggctagtccgttatcaacttgaaaaagtggcaccgagtcggtgcccacagatatccagaccctgccgtgtac

SEQ ID NO: 16578 - RNA, 123 nt, synthetic construct
  source 1..123: mol_type = other RNA
  modified_base 1: mod_base = OTHER; note = 2'-O-methyl modified nucleotide with phosphorothioate linkage
  modified_base 2: mod_base = OTHER; note = 2'-O-methyl modified nucleotide with phosphorothioate linkage
  modified_base 3: mod_base = OTHER; note = 2'-O-methyl modified nucleotide with phosphorothioate linkage
  modified_base 29: mod_base = OTHER; note = 2'-O-methyl modified nucleotide
  modified_base 30: mod_base = OTHER; note = 2'-O-methyl modified nucleotide
  modified_base 31: mod_base = OTHER; note = 2'-O-methyl modified nucleotide
  modified_base 32: mod_base = OTHER; note = 2'-O-methyl modified nucleotide
  modified_base 33: mod_base = OTHER; note = 2'-O-methyl modified nucleotide
  modified_base 34: mod_base = OTHER; note = 2'-O-methyl modified nucleotide
  modified_base 35: mod_base = OTHER; note = 2'-O-methyl modified nucleotide
  modified_base 36: mod_base = OTHER; note = 2'-O-methyl modified nucleotide
  modified_base 37: mod_base = OTHER; note = 2'-O-methyl modified nucleotide
  modified_base 38: mod_base = OTHER; note = 2'-O-methyl modified nucleotide
  modified_base 39: mod_base = OTHER; note = 2'-O-methyl modified nucleotide
  modified_base 40: mod_base = OTHER; note = 2'-O-methyl modified nucleotide
  modified_base 69: mod_base = OTHER; note = 2'-O-methyl modified nucleotide
  modified_base 70: mod_base = OTHER; note = 2'-O-methyl modified nucleotide
  modified_base 71: mod_base = OTHER; note = 2'-O-methyl modified nucleotide
  modified_base 72: mod_base = OTHER; note = 2'-O-methyl modified nucleotide
  modified_base 73: mod_base = OTHER; note = 2'-O-methyl modified nucleotide
  modified_base 74: mod_base = OTHER; note = 2'-O-methyl modified nucleotide
  modified_base 75: mod_base = OTHER; note = 2'-O-methyl modified nucleotide
  modified_base 76: mod_base = OTHER; note = 2'-O-methyl modified nucleotide
  modified_base 77: mod_base = OTHER; note = 2'-O-methyl modified nucleotide
  modified_base 78: mod_base = OTHER; note = 2'-O-methyl modified nucleotide
  modified_base 79: mod_base = OTHER; note = 2'-O-methyl modified nucleotide
  modified_base 80: mod_base = OTHER; note = 2'-O-methyl modified nucleotide
  modified_base 81: mod_base = OTHER; note = 2'-O-methyl modified nucleotide
  modified_base 82: mod_base = OTHER; note = 2'-O-methyl modified nucleotide
  modified_base 83: mod_base = OTHER; note = 2'-O-methyl modified nucleotide
  modified_base 84: mod_base = OTHER; note = 2'-O-methyl modified nucleotide
  modified_base 85: mod_base = OTHER; note = 2'-O-methyl modified nucleotide
  modified_base 86: mod_base = OTHER; note = 2'-O-methyl modified nucleotide
  modified_base 87: mod_base = OTHER; note = 2'-O-methyl modified nucleotide
  modified_base 88: mod_base = OTHER; note = 2'-O-methyl modified nucleotide
  modified_base 89: mod_base = OTHER; note = 2'-O-methyl modified nucleotide
  modified_base 90: mod_base = OTHER; note = 2'-O-methyl modified nucleotide
  modified_base 91: mod_base = OTHER; note = 2'-O-methyl modified nucleotide
  modified_base 92: mod_base = OTHER; note = 2'-O-methyl modified nucleotide
  modified_base 93: mod_base = OTHER; note = 2'-O-methyl modified nucleotide
  modified_base 94: mod_base = OTHER; note = 2'-O-methyl modified nucleotide
  modified_base 95: mod_base = OTHER; note = 2'-O-methyl modified nucleotide
  modified_base 96: mod_base = OTHER; note = 2'-O-methyl modified nucleotide
  modified_base 120: mod_base = OTHER; note = Nucleotide with phosphorothioate linkage
  modified_base 121: mod_base = OTHER; note = 2'-O-methyl modified nucleotide with phosphorothioate linkage
  modified_base 122: mod_base = OTHER; note = 2'-O-methyl modified nucleotide with phosphorothioate linkage
  modified_base 123: mod_base = OTHER; note = 2'-O-methyl modified nucleotide
gctggtacacggcagggtcagttttagagctagaaatagcaagttaaaataaggctagtccgttatcaacttgaaaaagtggcaccgagtcggtgcccacagatatccagaccctgccgtgta

SEQ ID NO: 16579 - RNA, 122 nt, synthetic construct
  source 1..122: mol_type = other RNA
  modified_base 1: mod_base = OTHER; note = 2'-O-methyl modified nucleotide with phosphorothioate linkage
  modified_base 2: mod_base = OTHER; note = 2'-O-methyl modified nucleotide with phosphorothioate linkage
  modified_base 3: mod_base = OTHER; note = 2'-O-methyl modified nucleotide with phosphorothioate linkage
  modified_base 29: mod_base = OTHER; note = 2'-O-methyl modified nucleotide
  modified_base 30: mod_base = OTHER; note = 2'-O-methyl modified nucleotide
  modified_base 31: mod_base = OTHER; note = 2'-O-methyl modified nucleotide
  modified_base 32: mod_base = OTHER; note = 2'-O-methyl modified nucleotide
  modified_base 33: mod_base = OTHER; note = 2'-O-methyl modified nucleotide
  modified_base 34: mod_base = OTHER; note = 2'-O-methyl modified nucleotide
  modified_base 35: mod_base = OTHER; note = 2'-O-methyl modified nucleotide
  modified_base 36: mod_base = OTHER; note = 2'-O-methyl modified nucleotide
  modified_base 37: mod_base = OTHER; note = 2'-O-methyl modified nucleotide
  modified_base 38: mod_base = OTHER; note = 2'-O-methyl modified nucleotide
  modified_base 39: mod_base = OTHER; note = 2'-O-methyl modified nucleotide
  modified_base 40: mod_base = OTHER; note = 2'-O-methyl modified nucleotide
  modified_base 69: mod_base = OTHER; note = 2'-O-methyl modified nucleotide
  modified_base 70: mod_base = OTHER; note = 2'-O-methyl modified nucleotide
  modified_base 71: mod_base = OTHER; note = 2'-O-methyl modified nucleotide
  modified_base 72: mod_base = OTHER; note = 2'-O-methyl modified nucleotide
  modified_base 73: mod_base = OTHER; note = 2'-O-methyl modified nucleotide
  modified_base 74: mod_base = OTHER; note = 2'-O-methyl modified nucleotide
  modified_base 75: mod_base = OTHER; note = 2'-O-methyl modified nucleotide
  modified_base 76: mod_base = OTHER; note = 2'-O-methyl modified nucleotide
  modified_base 77: mod_base = OTHER; note = 2'-O-methyl modified nucleotide
  modified_base 78: mod_base = OTHER; note = 2'-O-methyl modified nucleotide
  modified_base 79: mod_base = OTHER; note = 2'-O-methyl modified nucleotide
  modified_base 80: mod_base = OTHER; note = 2'-O-methyl modified nucleotide
  modified_base 81: mod_base = OTHER; note = 2'-O-methyl modified nucleotide
  modified_base 82: mod_base = OTHER; note = 2'-O-methyl modified nucleotide
  modified_base 83: mod_base = OTHER; note = 2'-O-methyl modified nucleotide
  modified_base 84: mod_base = OTHER; note = 2'-O-methyl modified nucleotide
  modified_base 85: mod_base = OTHER; note = 2'-O-methyl modified nucleotide
  modified_base 86: mod_base = OTHER; note = 2'-O-methyl modified nucleotide
  modified_base 87: mod_base = OTHER; note = 2'-O-methyl modified nucleotide
  modified_base 88: mod_base = OTHER; note = 2'-O-methyl modified nucleotide
  modified_base 89: mod_base = OTHER; note = 2'-O-methyl modified nucleotide
  modified_base 90: mod_base = OTHER; note = 2'-O-methyl modified nucleotide
  modified_base 91: mod_base = OTHER; note = 2'-O-methyl modified nucleotide
  modified_base 92: mod_base = OTHER; note = 2'-O-methyl modified nucleotide
  modified_base 93: mod_base = OTHER; note = 2'-O-methyl modified nucleotide
  modified_base 94: mod_base = OTHER; note = 2'-O-methyl modified nucleotide
  modified_base 95: mod_base = OTHER; note = 2'-O-methyl modified nucleotide
  modified_base 96: mod_base = OTHER; note = 2'-O-methyl modified nucleotide
  modified_base 119: mod_base = OTHER; note = Nucleotide with phosphorothioate linkage
  modified_base 120: mod_base = OTHER; note = 2'-O-methyl modified nucleotide with phosphorothioate linkage
  modified_base 121: mod_base = OTHER; note = 2'-O-methyl modified nucleotide with phosphorothioate linkage
  modified_base 122: mod_base = OTHER; note = 2'-O-methyl modified nucleotide
gctggtacacggcagggtcagttttagagctagaaatagcaagttaaaataaggctagtccgttatcaacttgaaaaagtggcaccgagtcggtgcccacagatatccagaccctgccgtgt

SEQ ID NO: 16580 - RNA, 121 nt, synthetic construct
  source 1..121: mol_type = other RNA
  modified_base 1: mod_base = OTHER; note = 2'-O-methyl modified nucleotide with phosphorothioate linkage
  modified_base 2: mod_base = OTHER; note = 2'-O-methyl modified nucleotide with phosphorothioate linkage
  modified_base 3: mod_base = OTHER; note = 2'-O-methyl modified nucleotide with phosphorothioate linkage
  modified_base 29: mod_base = OTHER; note = 2'-O-methyl modified nucleotide
  modified_base 30: mod_base = OTHER; note = 2'-O-methyl modified nucleotide
  modified_base 31: mod_base = OTHER; note = 2'-O-methyl modified nucleotide
  modified_base 32: mod_base = OTHER; note = 2'-O-methyl modified nucleotide
  modified_base 33: mod_base = OTHER; note = 2'-O-methyl modified nucleotide
  modified_base 34: mod_base = OTHER; note = 2'-O-methyl modified nucleotide
  modified_base 35: mod_base = OTHER; note = 2'-O-methyl modified nucleotide
  modified_base 36: mod_base = OTHER; note = 2'-O-methyl modified nucleotide
  modified_base 37: mod_base = OTHER; note = 2'-O-methyl modified nucleotide
  modified_base 38: mod_base = OTHER; note = 2'-O-methyl modified nucleotide
  modified_base 39: mod_base = OTHER; note = 2'-O-methyl modified nucleotide
  modified_base 40: mod_base = OTHER; note = 2'-O-methyl modified nucleotide
  modified_base 69: mod_base = OTHER; note = 2'-O-methyl modified nucleotide
  modified_base 70: mod_base = OTHER; note = 2'-O-methyl modified nucleotide
  modified_base 71: mod_base = OTHER; note = 2'-O-methyl modified nucleotide
  modified_base 72: mod_base = OTHER; note = 2'-O-methyl modified nucleotide
  modified_base 73: mod_base = OTHER; note = 2'-O-methyl modified nucleotide
  modified_base 74: mod_base = OTHER; note = 2'-O-methyl modified nucleotide
  modified_base 75: mod_base = OTHER; note = 2'-O-methyl modified nucleotide
  modified_base 76: mod_base = OTHER; note = 2'-O-methyl modified nucleotide
  modified_base 77: mod_base = OTHER; note = 2'-O-methyl modified nucleotide
  modified_base 78: mod_base = OTHER; note = 2'-O-methyl modified nucleotide
  modified_base 79: mod_base = OTHER; note = 2'-O-methyl modified nucleotide
  modified_base 80: mod_base = OTHER; note = 2'-O-methyl modified nucleotide
  modified_base 81: mod_base = OTHER; note = 2'-O-methyl modified nucleotide
  modified_base 82: mod_base = OTHER; note = 2'-O-methyl modified nucleotide
  modified_base 83: mod_base = OTHER; note = 2'-O-methyl modified nucleotide
  modified_base 84: mod_base = OTHER; note = 2'-O-methyl modified nucleotide
  modified_base 85: mod_base = OTHER; note = 2'-O-methyl modified nucleotide
  modified_base 86: mod_base = OTHER; note = 2'-O-methyl modified nucleotide
  modified_base 87: mod_base = OTHER; note = 2'-O-methyl modified nucleotide
  modified_base 88: mod_base = OTHER; note = 2'-O-methyl modified nucleotide
  modified_base 89: mod_base = OTHER; note = 2'-O-methyl modified nucleotide
  modified_base 90: mod_base = OTHER; note = 2'-O-methyl modified nucleotide
  modified_base 91: mod_base = OTHER; note = 2'-O-methyl modified nucleotide
  modified_base 92: mod_base = OTHER; note = 2'-O-methyl modified nucleotide
  modified_base 93: mod_base = OTHER; note = 2'-O-methyl modified nucleotide
  modified_base 94: mod_base = OTHER; note = 2'-O-methyl modified nucleotide
  modified_base 95: mod_base = OTHER; note = 2'-O-methyl modified nucleotide
  modified_base 96: mod_base = OTHER; note = 2'-O-methyl modified nucleotide
  modified_base 118: mod_base = OTHER; note = Nucleotide with phosphorothioate linkage
  modified_base 119: mod_base = OTHER; note = 2'-O-methyl modified nucleotide with phosphorothioate linkage
  modified_base 120: mod_base = OTHER; note = 2'-O-methyl modified nucleotide with phosphorothioate linkage
  modified_base 121: mod_base = OTHER; note = 2'-O-methyl modified nucleotide
gctggtacacggcagggtcagttttagagctagaaatagcaagttaaaataaggctagtccgttatcaacttgaaaaagtggcaccgagtcggtgcccacagatatccagaccctgccgtg

SEQ ID NO: 16581 - RNA, 120 nt, synthetic construct
  source 1..120: mol_type = other RNA
  modified_base 1: mod_base = OTHER; note = 2'-O-methyl modified nucleotide with phosphorothioate linkage
  modified_base 2: mod_base = OTHER; note = 2'-O-methyl modified nucleotide with phosphorothioate linkage
  modified_base 3: mod_base = OTHER; note = 2'-O-methyl modified nucleotide with phosphorothioate linkage
  modified_base 29: mod_base = OTHER; note = 2'-O-methyl modified nucleotide
  modified_base 30: mod_base = OTHER; note = 2'-O-methyl modified nucleotide
  modified_base 31: mod_base = OTHER; note = 2'-O-methyl modified nucleotide
  modified_base 32: mod_base = OTHER; note = 2'-O-methyl modified nucleotide
  modified_base 33: mod_base = OTHER; note = 2'-O-methyl modified nucleotide
  modified_base 34: mod_base = OTHER; note = 2'-O-methyl modified nucleotide
  modified_base 35: mod_base = OTHER; note = 2'-O-methyl modified nucleotide
  modified_base 36: mod_base = OTHER; note = 2'-O-methyl modified nucleotide
  modified_base 37: mod_base = OTHER; note = 2'-O-methyl modified nucleotide
  modified_base 38: mod_base = OTHER; note = 2'-O-methyl modified nucleotide
  modified_base 39: mod_base = OTHER; note = 2'-O-methyl modified nucleotide
  modified_base 40: mod_base = OTHER; note = 2'-O-methyl modified nucleotide
  modified_base 69: mod_base = OTHER; note = 2'-O-methyl modified nucleotide
  modified_base 70: mod_base = OTHER; note = 2'-O-methyl modified nucleotide
  modified_base 71: mod_base = OTHER; note = 2'-O-methyl modified nucleotide
  modified_base 72: mod_base = OTHER; note = 2'-O-methyl modified nucleotide
  modified_base 73: mod_base = OTHER; note = 2'-O-methyl modified nucleotide
  modified_base 74: mod_base = OTHER; note = 2'-O-methyl modified nucleotide
  modified_base 75: mod_base = OTHER; note = 2'-O-methyl modified nucleotide
  modified_base 76: mod_base = OTHER; note = 2'-O-methyl modified nucleotide
  modified_base 77: mod_base = OTHER; note = 2'-O-methyl modified nucleotide
  modified_base 78: mod_base = OTHER; note = 2'-O-methyl modified nucleotide
  modified_base 79: mod_base = OTHER; note = 2'-O-methyl modified nucleotide
  modified_base 80: mod_base = OTHER; note = 2'-O-methyl modified nucleotide
  modified_base 81: mod_base = OTHER; note = 2'-O-methyl modified nucleotide
  modified_base 82: mod_base = OTHER; note = 2'-O-methyl modified nucleotide
  modified_base 83: mod_base = OTHER; note = 2'-O-methyl modified nucleotide
  modified_base 84: mod_base = OTHER; note = 2'-O-methyl modified nucleotide
  modified_base 85: mod_base = OTHER; note = 2'-O-methyl modified nucleotide
  modified_base 86: mod_base = OTHER; note = 2'-O-methyl modified nucleotide
  modified_base 87: mod_base = OTHER; note = 2'-O-methyl modified nucleotide
  modified_base 88: mod_base = OTHER; note = 2'-O-methyl modified nucleotide
  modified_base 89: mod_base = OTHER; note = 2'-O-methyl modified nucleotide
  modified_base 90: mod_base = OTHER; note = 2'-O-methyl modified nucleotide
  modified_base 91: mod_base = OTHER; note = 2'-O-methyl modified nucleotide
  modified_base 92: mod_base = OTHER; note = 2'-O-methyl modified nucleotide
  modified_base 93: mod_base = OTHER; note = 2'-O-methyl modified nucleotide
  modified_base 94: mod_base = OTHER; note = 2'-O-methyl modified nucleotide
  modified_base 95: mod_base = OTHER; note = 2'-O-methyl modified nucleotide
  modified_base 96: mod_base = OTHER; note = 2'-O-methyl modified nucleotide
  modified_base 117: mod_base = OTHER; note = Nucleotide with phosphorothioate linkage
  modified_base 118: mod_base = OTHER; note = 2'-O-methyl modified nucleotide with phosphorothioate linkage
  modified_base 119: mod_base = OTHER; note = 2'-O-methyl modified nucleotide with phosphorothioate linkage
  modified_base 120: mod_base = OTHER; note = 2'-O-methyl modified nucleotide
gctggtacacggcagggtcagttttagagctagaaatagcaagttaaaataaggctagtccgttatcaacttgaaaaagtggcaccgagtcggtgcccacagatatccagaccctgccgt

SEQ ID NO: 16582 - RNA, 119 nt, synthetic construct
  source 1..119: mol_type = other RNA
  modified_base 1: mod_base = OTHER; note = 2'-O-methyl modified nucleotide with phosphorothioate linkage
  modified_base 2: mod_base = OTHER; note = 2'-O-methyl modified nucleotide with phosphorothioate linkage
  modified_base 3: mod_base = OTHER; note = 2'-O-methyl modified nucleotide with phosphorothioate linkage
  modified_base 29: mod_base = OTHER; note = 2'-O-methyl modified nucleotide
  modified_base 30: mod_base = OTHER; note = 2'-O-methyl modified nucleotide
  modified_base 31: mod_base = OTHER; note = 2'-O-methyl modified nucleotide
  modified_base 32: mod_base = OTHER; note = 2'-O-methyl modified nucleotide
  modified_base 33: mod_base = OTHER; note = 2'-O-methyl modified nucleotide
  modified_base 34: mod_base = OTHER; note = 2'-O-methyl modified nucleotide
  modified_base 35: mod_base = OTHER; note = 2'-O-methyl modified nucleotide
  modified_base 36: mod_base = OTHER; note = 2'-O-methyl modified nucleotide
  modified_base 37: mod_base = OTHER; note = 2'-O-methyl modified nucleotide
  modified_base 38: mod_base = OTHER; note = 2'-O-methyl modified nucleotide
  modified_base 39: mod_base = OTHER; note = 2'-O-methyl modified nucleotide
  modified_base 40: mod_base = OTHER; note = 2'-O-methyl modified nucleotide
  modified_base 69: mod_base = OTHER; note = 2'-O-methyl modified nucleotide
  modified_base 70: mod_base = OTHER; note = 2'-O-methyl modified nucleotide
  modified_base 71: mod_base = OTHER; note = 2'-O-methyl modified nucleotide
  modified_base 72: mod_base = OTHER; note = 2'-O-methyl modified nucleotide
  modified_base 73: mod_base = OTHER; note = 2'-O-methyl modified nucleotide
  modified_base 74: mod_base = OTHER; note = 2'-O-methyl modified nucleotide
  modified_base 75: mod_base = OTHER; note = 2'-O-methyl modified nucleotide
  modified_base 76: mod_base = OTHER; note = 2'-O-methyl modified nucleotide
  modified_base 77: mod_base = OTHER; note = 2'-O-methyl modified nucleotide
  modified_base 78: mod_base = OTHER; note = 2'-O-methyl modified nucleotide
  modified_base 79: mod_base = OTHER; note = 2'-O-methyl modified nucleotide
  modified_base 80: mod_base = OTHER; note = 2'-O-methyl modified nucleotide
  modified_base 81: mod_base = OTHER; note = 2'-O-methyl modified nucleotide
  modified_base 82: mod_base = OTHER; note = 2'-O-methyl modified nucleotide
  modified_base 83: mod_base = OTHER; note = 2'-O-methyl modified nucleotide
  modified_base 84: mod_base = OTHER; note = 2'-O-methyl modified nucleotide
  modified_base 85: mod_base = OTHER; note = 2'-O-methyl modified nucleotide
  modified_base 86: mod_base = OTHER; note = 2'-O-methyl modified nucleotide
  modified_base 87: mod_base = OTHER; note = 2'-O-methyl modified nucleotide
  modified_base 88: mod_base = OTHER; note = 2'-O-methyl modified nucleotide
  modified_base 89: mod_base = OTHER; note = 2'-O-methyl modified nucleotide
  modified_base 90: mod_base = OTHER; note = 2'-O-methyl modified nucleotide
  modified_base 91: mod_base = OTHER; note = 2'-O-methyl modified nucleotide
  modified_base 92: mod_base = OTHER; note = 2'-O-methyl modified nucleotide
  modified_base 93: mod_base = OTHER; note = 2'-O-methyl modified nucleotide
  modified_base 94: mod_base = OTHER; note = 2'-O-methyl modified nucleotide
  modified_base 95: mod_base = OTHER; note = 2'-O-methyl modified nucleotide
  modified_base 96: mod_base = OTHER; note = 2'-O-methyl modified nucleotide
  modified_base 116: mod_base = OTHER; note = Nucleotide with phosphorothioate linkage
  modified_base 117: mod_base = OTHER; note = 2'-O-methyl modified nucleotide with phosphorothioate linkage
  modified_base 118: mod_base = OTHER; note = 2'-O-methyl modified nucleotide with phosphorothioate linkage
  modified_base 119: mod_base = OTHER; note = 2'-O-methyl modified nucleotide
gctggtacacggcagggtcagttttagagctagaaatagcaagttaaaataaggctagtccgttatcaacttgaaaaagtggcaccgagtcggtgcccacagatatccagaccctgccg

SEQ ID NO: 16583 - RNA, 126 nt, synthetic construct
  source 1..126: mol_type = other RNA
  modified_base 1: mod_base = OTHER; note = 2'-O-methyl modified nucleotide with phosphorothioate linkage
  modified_base 2: mod_base = OTHER; note = 2'-O-methyl modified nucleotide with phosphorothioate linkage
  modified_base 3: mod_base = OTHER; note = 2'-O-methyl modified nucleotide with phosphorothioate linkage
  modified_base 29: mod_base = OTHER; note = 2'-O-methyl modified nucleotide
  modified_base 30: mod_base = OTHER; note = 2'-O-methyl modified nucleotide
  modified_base 31: mod_base = OTHER; note = 2'-O-methyl modified nucleotide
  modified_base 32: mod_base = OTHER; note = 2'-O-methyl modified nucleotide
  modified_base 33: mod_base = OTHER; note = 2'-O-methyl modified nucleotide
  modified_base 34: mod_base = OTHER; note = 2'-O-methyl modified nucleotide
  modified_base 35: mod_base = OTHER; note = 2'-O-methyl modified nucleotide
  modified_base 36: mod_base = OTHER; note = 2'-O-methyl modified nucleotide
  modified_base 37: mod_base = OTHER; note = 2'-O-methyl modified nucleotide
  modified_base 38: mod_base = OTHER; note = 2'-O-methyl modified nucleotide
  modified_base 39: mod_base = OTHER; note = 2'-O-methyl modified nucleotide
  modified_base 40: mod_base = OTHER; note = 2'-O-methyl modified nucleotide
  modified_base 69: mod_base = OTHER; note = 2'-O-methyl modified nucleotide
  modified_base 70: mod_base = OTHER; note = 2'-O-methyl modified nucleotide
  modified_base 71: mod_base = OTHER; note = 2'-O-methyl modified nucleotide
  modified_base 72: mod_base = OTHER; note = 2'-O-methyl modified nucleotide
  modified_base 73: mod_base = OTHER; note = 2'-O-methyl modified nucleotide
  modified_base 74: mod_base = OTHER; note = 2'-O-methyl modified nucleotide
  modified_base 75: mod_base = OTHER; note = 2'-O-methyl modified nucleotide
  modified_base 76: mod_base = OTHER; note = 2'-O-methyl modified nucleotide
  modified_base 77: mod_base = OTHER; note = 2'-O-methyl modified nucleotide
  modified_base 78: mod_base = OTHER; note = 2'-O-methyl modified nucleotide
  modified_base 79: mod_base = OTHER; note = 2'-O-methyl modified nucleotide
  modified_base 80: mod_base = OTHER; note = 2'-O-methyl modified nucleotide
  modified_base 81: mod_base = OTHER; note = 2'-O-methyl modified nucleotide
  modified_base 82: mod_base = OTHER; note = 2'-O-methyl modified nucleotide
  modified_base 83: mod_base = OTHER; note = 2'-O-methyl modified nucleotide
  modified_base 84: mod_base = OTHER; note = 2'-O-methyl modified nucleotide
  modified_base 85: mod_base = OTHER; note = 2'-O-methyl modified nucleotide
  modified_base 86: mod_base = OTHER; note = 2'-O-methyl modified nucleotide
  modified_base 87: mod_base = OTHER; note = 2'-O-methyl modified nucleotide
  modified_base 88: mod_base = OTHER; note = 2'-O-methyl modified nucleotide
  modified_base 89: mod_base = OTHER; note = 2'-O-methyl modified nucleotide
  modified_base 90: mod_base = OTHER; note = 2'-O-methyl modified nucleotide
  modified_base 91: mod_base = OTHER; note = 2'-O-methyl modified nucleotide
  modified_base 92: mod_base = OTHER; note = 2'-O-methyl modified nucleotide
  modified_base 93: mod_base = OTHER; note = 2'-O-methyl modified nucleotide
  modified_base 94: mod_base = OTHER; note = 2'-O-methyl modified nucleotide
  modified_base 95: mod_base = OTHER; note = 2'-O-methyl modified nucleotide
  modified_base 96: mod_base = OTHER; note = 2'-O-methyl modified nucleotide
  modified_base 123: mod_base = OTHER; note = Nucleotide with phosphorothioate linkage
  modified_base 124: mod_base = OTHER; note = 2'-O-methyl modified nucleotide with phosphorothioate linkage
  modified_base 125: mod_base = OTHER; note = 2'-O-methyl modified nucleotide with phosphorothioate linkage
  modified_base 126: mod_base = OTHER; note = 2'-O-methyl modified nucleotide
gctggtacacggcagggtcagttttagagctagaaatagcaagttaaaataaggctagtccgttatcaacttgaaaaagtggcaccgagtcggtgctcccacagatatccagaccctgccgtgtac

SEQ ID NO: 16584 - RNA, 125 nt, synthetic construct
  source 1..125: mol_type = other RNA
  modified_base 1: mod_base = OTHER; note = 2'-O-methyl modified nucleotide with phosphorothioate linkage
  modified_base 2: mod_base = OTHER; note = 2'-O-methyl modified nucleotide with phosphorothioate linkage
  modified_base 3: mod_base = OTHER; note = 2'-O-methyl modified nucleotide with phosphorothioate linkage
  modified_base 29: mod_base = OTHER; note = 2'-O-methyl modified nucleotide
  modified_base 30: mod_base = OTHER; note = 2'-O-methyl modified nucleotide
  modified_base 31: mod_base = OTHER; note = 2'-O-methyl modified nucleotide
  modified_base 32: mod_base = OTHER; note = 2'-O-methyl modified nucleotide
  modified_base 33: mod_base = OTHER; note = 2'-O-methyl modified nucleotide
  modified_base 34: mod_base = OTHER; note = 2'-O-methyl modified nucleotide
  modified_base 35: mod_base = OTHER; note = 2'-O-methyl modified nucleotide
  modified_base 36: mod_base = OTHER; note = 2'-O-methyl modified nucleotide
  modified_base 37: mod_base = OTHER; note = 2'-O-methyl modified nucleotide
  modified_base 38: mod_base = OTHER; note = 2'-O-methyl modified nucleotide
  modified_base 39: mod_base = OTHER; note = 2'-O-methyl modified nucleotide
  modified_base 40: mod_base = OTHER; note = 2'-O-methyl modified nucleotide
  modified_base 69: mod_base = OTHER; note = 2'-O-methyl modified nucleotide
  modified_base 70: mod_base = OTHER; note = 2'-O-methyl modified nucleotide
  modified_base 71: mod_base = OTHER; note = 2'-O-methyl modified nucleotide
  modified_base 72: mod_base = OTHER; note = 2'-O-methyl modified nucleotide
  modified_base 73: mod_base = OTHER; note = 2'-O-methyl modified nucleotide
  modified_base 74: mod_base = OTHER; note = 2'-O-methyl modified nucleotide
  modified_base 75: mod_base = OTHER; note = 2'-O-methyl modified nucleotide
  modified_base 76: mod_base = OTHER; note = 2'-O-methyl modified nucleotide
  modified_base 77: mod_base = OTHER; note = 2'-O-methyl modified nucleotide
  modified_base 78: mod_base = OTHER; note = 2'-O-methyl modified nucleotide
  modified_base 79: mod_base = OTHER; note = 2'-O-methyl modified nucleotide
  modified_base 80: mod_base = OTHER; note = 2'-O-methyl modified nucleotide
  modified_base 81: mod_base = OTHER; note = 2'-O-methyl modified nucleotide
  modified_base 82: mod_base = OTHER; note = 2'-O-methyl modified nucleotide
  modified_base 83: mod_base = OTHER; note = 2'-O-methyl modified nucleotide
  modified_base 84: mod_base = OTHER; note = 2'-O-methyl modified nucleotide
  modified_base 85: mod_base = OTHER; note = 2'-O-methyl modified nucleotide
  modified_base 86: mod_base = OTHER; note = 2'-O-methyl modified nucleotide
  modified_base 87: mod_base = OTHER; note = 2'-O-methyl modified nucleotide
  modified_base 88: mod_base = OTHER; note = 2'-O-methyl modified nucleotide
  modified_base 89: mod_base = OTHER; note = 2'-O-methyl modified nucleotide
  modified_base 90: mod_base = OTHER; note = 2'-O-methyl modified nucleotide
  modified_base 91: mod_base = OTHER; note = 2'-O-methyl modified nucleotide
  modified_base 92: mod_base = OTHER; note = 2'-O-methyl modified nucleotide
  modified_base 93: mod_base = OTHER; note = 2'-O-methyl modified nucleotide
  modified_base 94: mod_base = OTHER; note = 2'-O-methyl modified nucleotide
  modified_base 95: mod_base = OTHER; note = 2'-O-methyl modified nucleotide
  modified_base 96: mod_base = OTHER; note = 2'-O-methyl modified nucleotide
  modified_base 122: mod_base = OTHER; note = Nucleotide with phosphorothioate linkage
  modified_base 123: mod_base = OTHER; note = 2'-O-methyl modified nucleotide with phosphorothioate linkage
  modified_base 124: mod_base = OTHER; note = 2'-O-methyl modified nucleotide with phosphorothioate linkage
  modified_base 125: mod_base = OTHER; note = 2'-O-methyl modified nucleotide
gctggtacacggcagggtcagttttagagctagaaatagcaagttaaaataaggctagtccgttatcaacttgaaaaagtggcaccgagtcggtgctcccacagatatccagaccctgccgtgta

SEQ ID NO: 16585 - RNA, 124 nt, synthetic construct
  source 1..124: mol_type = other RNA
  modified_base 1: mod_base = OTHER; note = 2'-O-methyl modified nucleotide with phosphorothioate linkage
  modified_base 2: mod_base = OTHER; note = 2'-O-methyl modified nucleotide with phosphorothioate linkage
  modified_base 3: mod_base = OTHER; note = 2'-O-methyl modified nucleotide with phosphorothioate linkage
  modified_base 29: mod_base = OTHER; note = 2'-O-methyl modified nucleotide
  modified_base 30: mod_base = OTHER; note = 2'-O-methyl modified nucleotide
  modified_base 31: mod_base = OTHER; note = 2'-O-methyl modified nucleotide
  modified_base 32: mod_base = OTHER; note = 2'-O-methyl modified nucleotide
  modified_base 33: mod_base = OTHER; note = 2'-O-methyl modified nucleotide
  modified_base 34: mod_base = OTHER; note = 2'-O-methyl modified nucleotide
  modified_base 35: mod_base = OTHER; note = 2'-O-methyl modified nucleotide
  modified_base 36: mod_base = OTHER; note = 2'-O-methyl modified nucleotide
  modified_base 37: mod_base = OTHER; note = 2'-O-methyl modified nucleotide
  modified_base 38: mod_base = OTHER; note = 2'-O-methyl modified nucleotide
  modified_base 39: mod_base = OTHER; note = 2'-O-methyl modified nucleotide
  modified_base 40: mod_base = OTHER; note = 2'-O-methyl modified nucleotide
  modified_base 69: mod_base = OTHER; note = 2'-O-methyl modified nucleotide
  modified_base 70: mod_base = OTHER; note = 2'-O-methyl modified nucleotide
  modified_base 71: mod_base = OTHER; note = 2'-O-methyl modified nucleotide
  modified_base 72: mod_base = OTHER; note = 2'-O-methyl modified nucleotide
  modified_base 73: mod_base = OTHER; note = 2'-O-methyl modified nucleotide
  modified_base 74: mod_base = OTHER; note = 2'-O-methyl modified nucleotide
  modified_base 75: mod_base = OTHER; note = 2'-O-methyl modified nucleotide
  modified_base 76: mod_base = OTHER; note = 2'-O-methyl modified nucleotide
  modified_base 77: mod_base = OTHER; note = 2'-O-methyl modified nucleotide
  modified_base 78: mod_base = OTHER; note = 2'-O-methyl modified nucleotide
  modified_base 79: mod_base = OTHER; note = 2'-O-methyl modified nucleotide
  modified_base 80: mod_base = OTHER; note = 2'-O-methyl modified nucleotide
  modified_base 81: mod_base = OTHER; note = 2'-O-methyl modified nucleotide
  modified_base 82: mod_base = OTHER; note = 2'-O-methyl modified nucleotide
  modified_base 83: mod_base = OTHER; note = 2'-O-methyl modified nucleotide
  modified_base 84: mod_base = OTHER; note = 2'-O-methyl modified nucleotide
  modified_base 85: mod_base = OTHER; note = 2'-O-methyl modified nucleotide
  modified_base 86: mod_base = OTHER; note = 2'-O-methyl modified nucleotide
  modified_base 87: mod_base = OTHER; note = 2'-O-methyl modified nucleotide
  modified_base 88: mod_base = OTHER; note = 2'-O-methyl modified nucleotide
  modified_base 89: mod_base = OTHER; note = 2'-O-methyl modified nucleotide
  modified_base 90: mod_base = OTHER; note = 2'-O-methyl modified nucleotide
  modified_base 91: mod_base = OTHER; note = 2'-O-methyl modified nucleotide
  modified_base 92: mod_base = OTHER; note = 2'-O-methyl modified nucleotide
  modified_base 93: mod_base = OTHER; note = 2'-O-methyl modified nucleotide
  modified_base 94: mod_base = OTHER; note = 2'-O-methyl modified nucleotide
  modified_base 95: mod_base = OTHER; note = 2'-O-methyl modified nucleotide
  modified_base 96: mod_base = OTHER; note = 2'-O-methyl modified nucleotide
  modified_base 121: mod_base = OTHER; note = Nucleotide with phosphorothioate linkage
  modified_base 122: mod_base = OTHER; note = 2'-O-methyl modified nucleotide with phosphorothioate linkage
  modified_base 123: mod_base = OTHER; note = 2'-O-methyl modified nucleotide with phosphorothioate linkage
  modified_base 124: mod_base = OTHER; note = 2'-O-methyl modified nucleotide
gctggtacacggcagggtcagttttagagctagaaatagcaagttaaaataaggctagtccgttatcaacttgaaaaagtggcaccgagtcggtgctcccacagatatccagaccctgccgtgt

SEQ ID NO: 16586 - RNA, 123 nt, synthetic construct
  source 1..123: mol_type = other RNA
  modified_base 1: mod_base = OTHER; note = 2'-O-methyl modified nucleotide with phosphorothioate linkage
  modified_base 2: mod_base = OTHER; note = 2'-O-methyl modified nucleotide with phosphorothioate linkage
  modified_base 3: mod_base = OTHER; note = 2'-O-methyl modified nucleotide with phosphorothioate linkage
  modified_base 29: mod_base = OTHER; note = 2'-O-methyl modified nucleotide
  modified_base 30: mod_base = OTHER; note = 2'-O-methyl modified nucleotide
  modified_base 31: mod_base = OTHER; note = 2'-O-methyl modified nucleotide
  modified_base 32: mod_base = OTHER; note = 2'-O-methyl modified nucleotide
  modified_base 33: mod_base = OTHER; note = 2'-O-methyl modified nucleotide
  modified_base 34: mod_base = OTHER; note = 2'-O-methyl modified nucleotide
  modified_base 35: mod_base = OTHER; note = 2'-O-methyl modified nucleotide
  modified_base 36: mod_base = OTHER; note = 2'-O-methyl modified nucleotide
  modified_base 37: mod_base = OTHER; note = 2'-O-methyl modified nucleotide
  modified_base 38: mod_base = OTHER; note = 2'-O-methyl modified nucleotide
  modified_base 39: mod_base = OTHER; note = 2'-O-methyl modified nucleotide
  modified_base 40: mod_base = OTHER; note = 2'-O-methyl modified nucleotide
  modified_base 69: mod_base = OTHER; note = 2'-O-methyl modified nucleotide
  modified_base 70: mod_base = OTHER; note = 2'-O-methyl modified nucleotide
  modified_base 71: mod_base = OTHER; note = 2'-O-methyl modified nucleotide
  modified_base 72: mod_base = OTHER; note = 2'-O-methyl modified nucleotide
  modified_base 73: mod_base = OTHER; note = 2'-O-methyl modified nucleotide
  modified_base 74: mod_base = OTHER; note = 2'-O-methyl modified nucleotide
  modified_base 75: mod_base = OTHER; note = 2'-O-methyl modified nucleotide
  modified_base 76: mod_base = OTHER; note = 2'-O-methyl modified nucleotide
  modified_base 77: mod_base = OTHER; note = 2'-O-methyl modified nucleotide
  modified_base 78: mod_base = OTHER; note = 2'-O-methyl modified nucleotide
  modified_base 79: mod_base = OTHER; note = 2'-O-methyl modified nucleotide
  modified_base 80: mod_base = OTHER; note = 2'-O-methyl modified nucleotide
  modified_base 81: mod_base = OTHER; note = 2'-O-methyl modified nucleotide
  modified_base 82: mod_base = OTHER; note = 2'-O-methyl modified nucleotide
  modified_base 83: mod_base = OTHER; note = 2'-O-methyl modified nucleotide
  modified_base 84: mod_base = OTHER; note = 2'-O-methyl modified nucleotide
  modified_base 85: mod_base = OTHER; note = 2'-O-methyl modified nucleotide
  modified_base 86: mod_base = OTHER; note = 2'-O-methyl modified nucleotide
  modified_base 87: mod_base = OTHER; note = 2'-O-methyl modified nucleotide
  modified_base 88: mod_base = OTHER; note = 2'-O-methyl modified nucleotide
  modified_base 89: mod_base = OTHER; note = 2'-O-methyl modified nucleotide
  modified_base 90: mod_base = OTHER; note = 2'-O-methyl modified nucleotide
  modified_base 91: mod_base = OTHER; note = 2'-O-methyl modified nucleotide
  modified_base 92: mod_base = OTHER; note = 2'-O-methyl modified nucleotide
  modified_base 93: mod_base = OTHER; note = 2'-O-methyl modified nucleotide
  modified_base 94: mod_base = OTHER; note = 2'-O-methyl modified nucleotide
  modified_base 95: mod_base = OTHER; note = 2'-O-methyl modified nucleotide
  modified_base 96: mod_base = OTHER; note = 2'-O-methyl modified nucleotide
  modified_base 120: mod_base = OTHER; note = Nucleotide with phosphorothioate linkage
  modified_base 121: mod_base = OTHER; note = 2'-O-methyl modified nucleotide with phosphorothioate linkage
  modified_base 122: mod_base = OTHER; note = 2'-O-methyl modified nucleotide with phosphorothioate linkage
  modified_base 123: mod_base = OTHER; note = 2'-O-methyl modified nucleotide
gctggtacacggcagggtcagttttagagctagaaatagcaagttaaaataaggctagtccgttatcaacttgaaaaagtggcaccgagtcggtgctcccacagatatccagaccctgccgtg

SEQ ID NO: 16587 - RNA, 122 nt, synthetic construct
  source 1..122: mol_type = other RNA
  modified_base 1: mod_base = OTHER; note = 2'-O-methyl modified nucleotide with phosphorothioate linkage
  modified_base 2: mod_base = OTHER; note = 2'-O-methyl modified nucleotide with phosphorothioate linkage
  modified_base 3: mod_base = OTHER; note = 2'-O-methyl modified nucleotide with phosphorothioate linkage
  modified_base 29: mod_base = OTHER; note = 2'-O-methyl modified nucleotide
  modified_base 30: mod_base = OTHER; note = 2'-O-methyl modified nucleotide
  modified_base 31: mod_base = OTHER; note = 2'-O-methyl modified nucleotide
  modified_base 32: mod_base = OTHER; note = 2'-O-methyl modified nucleotide
  modified_base 33: mod_base = OTHER; note = 2'-O-methyl modified nucleotide
  modified_base 34: mod_base = OTHER; note = 2'-O-methyl modified nucleotide
  modified_base 35: mod_base = OTHER; note = 2'-O-methyl modified nucleotide
  modified_base 36: mod_base = OTHER; note = 2'-O-methyl modified nucleotide
  modified_base 37: mod_base = OTHER; note = 2'-O-methyl modified nucleotide
  modified_base 38: mod_base = OTHER; note = 2'-O-methyl modified nucleotide
  modified_base 39: mod_base = OTHER; note = 2'-O-methyl modified nucleotide
  modified_base 40: mod_base = OTHER; note = 2'-O-methyl modified nucleotide
  modified_base 69: mod_base = OTHER; note = 2'-O-methyl modified nucleotide
  modified_base 70: mod_base = OTHER; note = 2'-O-methyl modified nucleotide
  modified_base 71: mod_base = OTHER; note = 2'-O-methyl modified nucleotide
  modified_base 72: mod_base = OTHER; note = 2'-O-methyl modified nucleotide
  modified_base 73: mod_base = OTHER; note = 2'-O-methyl modified nucleotide
  modified_base 74: mod_base = OTHER; note = 2'-O-methyl modified nucleotide
  modified_base 75: mod_base = OTHER; note = 2'-O-methyl modified nucleotide
  modified_base 76: mod_base = OTHER; note = 2'-O-methyl modified nucleotide
  modified_base 77: mod_base = OTHER; note = 2'-O-methyl modified nucleotide
  modified_base 78: mod_base = OTHER; note = 2'-O-methyl modified nucleotide
  modified_base 79: mod_base = OTHER; note = 2'-O-methyl modified nucleotide
  modified_base 80: mod_base = OTHER; note = 2'-O-methyl modified nucleotide
  modified_base 81: mod_base = OTHER; note = 2'-O-methyl modified nucleotide
  modified_base 82: mod_base = OTHER; note = 2'-O-methyl modified nucleotide
  modified_base 83: mod_base = OTHER; note = 2'-O-methyl modified nucleotide
  modified_base 84: mod_base = OTHER; note = 2'-O-methyl modified nucleotide
  modified_base 85: mod_base = OTHER; note = 2'-O-methyl modified nucleotide
  modified_base 86: mod_base = OTHER; note = 2'-O-methyl modified nucleotide
  modified_base 87: mod_base = OTHER; note = 2'-O-methyl modified nucleotide
  modified_base 88: mod_base = OTHER; note = 2'-O-methyl modified nucleotide
  modified_base 89: mod_base = OTHER; note = 2'-O-methyl modified nucleotide
  modified_base 90: mod_base = OTHER; note = 2'-O-methyl modified nucleotide
  modified_base 91: mod_base = OTHER; note = 2'-O-methyl modified nucleotide
  modified_base 92: mod_base = OTHER; note = 2'-O-methyl modified nucleotide
  modified_base 93: mod_base = OTHER; note = 2'-O-methyl modified nucleotide
  modified_base 94: mod_base = OTHER; note = 2'-O-methyl modified nucleotide
  modified_base 95: mod_base = OTHER; note = 2'-O-methyl modified nucleotide
  modified_base 96: mod_base = OTHER; note = 2'-O-methyl modified nucleotide
  modified_base 119: mod_base = OTHER; note = Nucleotide with phosphorothioate linkage
  modified_base 120: mod_base = OTHER; note = 2'-O-methyl modified nucleotide with phosphorothioate linkage
  modified_base 121: mod_base = OTHER; note = 2'-O-methyl modified nucleotide with phosphorothioate linkage
  modified_base 122: mod_base = OTHER; note = 2'-O-methyl modified nucleotide
gctggtacacggcagggtcagttttagagctagaaatagcaagttaaaataaggctagtccgttatcaacttgaaaaagtggcaccgagtcggtgctcccacagatatccagaccctgccgt

SEQ ID NO: 16588 - RNA, 121 nt, synthetic construct
  source 1..121: mol_type = other RNA
  modified_base 1: mod_base = OTHER; note = 2'-O-methyl modified nucleotide with phosphorothioate linkage
  modified_base 2: mod_base = OTHER; note = 2'-O-methyl modified nucleotide with phosphorothioate linkage
  modified_base 3: mod_base = OTHER; note = 2'-O-methyl modified nucleotide with phosphorothioate linkage
  modified_base 29: mod_base = OTHER; note = 2'-O-methyl modified nucleotide
  modified_base 30: mod_base = OTHER; note = 2'-O-methyl modified nucleotide
  modified_base 31: mod_base = OTHER; note = 2'-O-methyl modified nucleotide
  modified_base 32: mod_base = OTHER; note = 2'-O-methyl modified nucleotide
  modified_base 33: mod_base = OTHER; note = 2'-O-methyl modified nucleotide
  modified_base 34: mod_base = OTHER; note = 2'-O-methyl modified nucleotide
  modified_base 35: mod_base = OTHER; note = 2'-O-methyl modified nucleotide
  modified_base 36: mod_base = OTHER; note = 2'-O-methyl modified nucleotide
  modified_base 37: mod_base = OTHER; note = 2'-O-methyl modified nucleotide
  modified_base 38: mod_base = OTHER; note = 2'-O-methyl modified nucleotide
  modified_base 39: mod_base = OTHER; note = 2'-O-methyl modified nucleotide
  modified_base 40: mod_base = OTHER; note = 2'-O-methyl modified nucleotide
  modified_base 69: mod_base = OTHER; note = 2'-O-methyl modified nucleotide
  modified_base 70: mod_base = OTHER; note = 2'-O-methyl modified nucleotide
  modified_base 71: mod_base = OTHER; note = 2'-O-methyl modified nucleotide
  modified_base 72: mod_base = OTHER; note = 2'-O-methyl modified nucleotide
  modified_base 73: mod_base = OTHER; note = 2'-O-methyl modified nucleotide
  modified_base 74: mod_base = OTHER; note = 2'-O-methyl modified nucleotide
  modified_base 75: mod_base = OTHER; note = 2'-O-methyl modified nucleotide
  modified_base 76: mod_base = OTHER; note = 2'-O-methyl modified nucleotide
  modified_base 77: mod_base = OTHER; note = 2'-O-methyl modified nucleotide
  modified_base 78: mod_base = OTHER; note = 2'-O-methyl modified nucleotide
  modified_base 79: mod_base = OTHER; note = 2'-O-methyl modified nucleotide
  modified_base 80: mod_base = OTHER; note = 2'-O-methyl modified nucleotide
  modified_base 81: mod_base = OTHER; note = 2'-O-methyl modified nucleotide
  modified_base 82: mod_base = OTHER; note = 2'-O-methyl modified nucleotide
  modified_base 83: mod_base = OTHER; note = 2'-O-methyl modified nucleotide
  modified_base 84: mod_base = OTHER; note = 2'-O-methyl modified nucleotide
  modified_base 85: mod_base = OTHER; note = 2'-O-methyl modified nucleotide
  modified_base 86: mod_base = OTHER; note = 2'-O-methyl modified nucleotide
  modified_base 87: mod_base = OTHER; note = 2'-O-methyl modified nucleotide
  modified_base 88: mod_base = OTHER; note = 2'-O-methyl modified nucleotide
  modified_base 89: mod_base = OTHER; note = 2'-O-methyl modified nucleotide
  modified_base 90: mod_base = OTHER; note = 2'-O-methyl modified nucleotide
  modified_base 91: mod_base = OTHER; note = 2'-O-methyl modified nucleotide
  modified_base 92: mod_base = OTHER; note = 2'-O-methyl modified nucleotide
  modified_base 93: mod_base = OTHER; note = 2'-O-methyl modified nucleotide
  modified_base 94: mod_base = OTHER; note = 2'-O-methyl modified nucleotide
  modified_base 95: mod_base = OTHER; note = 2'-O-methyl modified nucleotide
  modified_base 96: mod_base = OTHER; note = 2'-O-methyl modified nucleotide
  modified_base 118: mod_base = OTHER; note = Nucleotide with phosphorothioate linkage
  modified_base 119: mod_base = OTHER; note = 2'-O-methyl modified nucleotide with phosphorothioate linkage
  modified_base 120: mod_base = OTHER; note = 2'-O-methyl modified nucleotide with phosphorothioate linkage
  modified_base 121: mod_base = OTHER; note = 2'-O-methyl modified nucleotide
gctggtacacggcagggtcagttttagagctagaaatagcaagttaaaataaggctagtccgttatcaacttgaaaaagtggcaccgagtcggtgctcccacagatatccagaccctgccg

SEQ ID NO: 16589 - RNA, 122 nt, synthetic construct
  source 1..122: mol_type = other RNA
  modified_base 1: mod_base = OTHER; note = 2'-O-methyl modified nucleotide with phosphorothioate linkage
  modified_base 2: mod_base = OTHER; note = 2'-O-methyl modified nucleotide with phosphorothioate linkage
  modified_base 3: mod_base = OTHER; note = 2'-O-methyl modified nucleotide with phosphorothioate linkage
  modified_base 29: mod_base = OTHER; note = 2'-O-methyl modified nucleotide
  modified_base 30: mod_base = OTHER; note = 2'-O-methyl modified nucleotide
  modified_base 31: mod_base = OTHER; note = 2'-O-methyl modified nucleotide
  modified_base 32: mod_base = OTHER; note = 2'-O-methyl modified nucleotide
  modified_base 33: mod_base = OTHER; note = 2'-O-methyl modified nucleotide
  modified_base 34: mod_base = OTHER; note = 2'-O-methyl modified nucleotide
  modified_base 35: mod_base = OTHER; note = 2'-O-methyl modified nucleotide
  modified_base 36: mod_base = OTHER; note = 2'-O-methyl modified nucleotide
  modified_base 37: mod_base = OTHER; note = 2'-O-methyl modified nucleotide
  modified_base 38: mod_base = OTHER; note = 2'-O-methyl modified nucleotide
  modified_base 39: mod_base = OTHER; note = 2'-O-methyl modified nucleotide
  modified_base 40: mod_base = OTHER; note = 2'-O-methyl modified nucleotide
  modified_base 69: mod_base = OTHER; note = 2'-O-methyl modified nucleotide
  modified_base 70: mod_base = OTHER; note = 2'-O-methyl modified nucleotide
  modified_base 71: mod_base = OTHER; note = 2'-O-methyl modified nucleotide
  modified_base 72: mod_base = OTHER; note = 2'-O-methyl modified nucleotide
  modified_base 73: mod_base = OTHER; note = 2'-O-methyl modified nucleotide
  modified_base 74: mod_base = OTHER; note = 2'-O-methyl modified nucleotide
  modified_base 75: mod_base = OTHER; note = 2'-O-methyl modified nucleotide
  modified_base 76: mod_base = OTHER; note = 2'-O-methyl modified nucleotide
  modified_base 77: mod_base = OTHER; note = 2'-O-methyl modified nucleotide
  modified_base 78: mod_base = OTHER; note = 2'-O-methyl modified nucleotide
  modified_base 79: mod_base = OTHER; note = 2'-O-methyl modified nucleotide
  modified_base 80: mod_base = OTHER; note = 2'-O-methyl modified nucleotide
  modified_base 81: mod_base = OTHER; note = 2'-O-methyl modified nucleotide
  modified_base 82: mod_base = OTHER; note = 2'-O-methyl modified nucleotide
  modified_base 83: mod_base = OTHER; note = 2'-O-methyl modified nucleotide
  modified_base 84: mod_base = OTHER; note = 2'-O-methyl modified nucleotide
  modified_base 85: mod_base = OTHER; note = 2'-O-methyl modified nucleotide
  modified_base 86: mod_base = OTHER; note = 2'-O-methyl modified nucleotide
  modified_base 87: mod_base = OTHER; note = 2'-O-methyl modified nucleotide
  modified_base 88: mod_base = OTHER; note = 2'-O-methyl modified nucleotide
  modified_base 89: mod_base = OTHER; note = 2'-O-methyl modified nucleotide
  modified_base 90: mod_base = OTHER; note = 2'-O-methyl modified nucleotide
  modified_base 91: mod_base = OTHER; note = 2'-O-methyl modified nucleotide
  modified_base 92: mod_base = OTHER; note = 2'-O-methyl modified nucleotide
  modified_base 93: mod_base = OTHER; note = 2'-O-methyl modified nucleotide
  modified_base 94: mod_base = OTHER; note = 2'-O-methyl modified nucleotide
  modified_base 95: mod_base = OTHER; note = 2'-O-methyl modified nucleotide
  modified_base 96: mod_base = OTHER; note = 2'-O-methyl modified nucleotide
  modified_base 119: mod_base = OTHER; note = Nucleotide with phosphorothioate linkage
  modified_base 120: mod_base = OTHER; note = 2'-O-methyl modified nucleotide with phosphorothioate linkage
  modified_base 121: mod_base = OTHER; note = 2'-O-methyl modified nucleotide with phosphorothioate linkage
  modified_base 122: mod_base = OTHER; note = 2'-O-methyl modified nucleotide
gctggtacacggcagggtcagttttagagctagaaatagcaagttaaaataaggctagtccgttatcaacttgaaaaagtggcaccgagtcggtgcaaccctagtgtgaccctgccgtgtac

SEQ ID NO: 16590 - RNA, 121 nt, synthetic construct
  source 1..121: mol_type = other RNA
  modified_base 1: mod_base = OTHER; note = 2'-O-methyl modified nucleotide with phosphorothioate linkage
  modified_base 2: mod_base = OTHER; note = 2'-O-methyl modified nucleotide with phosphorothioate linkage
  modified_base 3: mod_base = OTHER; note = 2'-O-methyl modified nucleotide with phosphorothioate linkage
  modified_base 29: mod_base = OTHER; note = 2'-O-methyl modified nucleotide
  modified_base 30: mod_base = OTHER; note = 2'-O-methyl modified nucleotide
  modified_base 31: mod_base = OTHER; note = 2'-O-methyl modified nucleotide
  modified_base 32: mod_base = OTHER; note = 2'-O-methyl modified nucleotide
  modified_base 33: mod_base = OTHER; note = 2'-O-methyl modified nucleotide
  modified_base 34: mod_base = OTHER; note = 2'-O-methyl modified nucleotide
  modified_base 35: mod_base = OTHER; note = 2'-O-methyl modified nucleotide
  modified_base 36: mod_base = OTHER; note = 2'-O-methyl modified nucleotide
  modified_base 37: mod_base = OTHER; note = 2'-O-methyl modified nucleotide
  modified_base 38: mod_base = OTHER; note = 2'-O-methyl modified nucleotide
  modified_base 39: mod_base = OTHER; note = 2'-O-methyl modified nucleotide
  modified_base 40: mod_base = OTHER; note = 2'-O-methyl modified nucleotide
  modified_base 69: mod_base = OTHER; note = 2'-O-methyl modified nucleotide
  modified_base 70: mod_base = OTHER; note = 2'-O-methyl modified nucleotide
  modified_base 71: mod_base = OTHER; note = 2'-O-methyl modified nucleotide
  modified_base 72: mod_base = OTHER; note = 2'-O-methyl modified nucleotide
  modified_base 73: mod_base = OTHER; note = 2'-O-methyl modified nucleotide
  modified_base 74: mod_base = OTHER; note = 2'-O-methyl modified nucleotide
  modified_base 75: mod_base = OTHER; note = 2'-O-methyl modified nucleotide
  modified_base 76: mod_base = OTHER; note = 2'-O-methyl modified nucleotide
  modified_base 77: mod_base = OTHER; note = 2'-O-methyl modified nucleotide
  modified_base 78: mod_base = OTHER; note = 2'-O-methyl modified nucleotide
  modified_base 79: mod_base = OTHER; note = 2'-O-methyl modified nucleotide
  modified_base 80: mod_base = OTHER; note = 2'-O-methyl modified nucleotide
  modified_base 81: mod_base = OTHER; note = 2'-O-methyl modified nucleotide
  modified_base 82: mod_base = OTHER; note = 2'-O-methyl modified nucleotide
  modified_base 83: mod_base = OTHER; note = 2'-O-methyl modified nucleotide
  modified_base 84: mod_base = OTHER; note = 2'-O-methyl modified nucleotide
  modified_base 85: mod_base = OTHER; note = 2'-O-methyl modified nucleotide
  modified_base 86: mod_base = OTHER; note = 2'-O-methyl modified nucleotide
  modified_base 87: mod_base = OTHER; note = 2'-O-methyl modified nucleotide
  modified_base 88: mod_base = OTHER; note = 2'-O-methyl modified nucleotide
  modified_base 89: mod_base = OTHER; note = 2'-O-methyl modified nucleotide
  modified_base 90: mod_base = OTHER; note = 2'-O-methyl modified nucleotide
  modified_base 91: mod_base = OTHER; note = 2'-O-methyl modified nucleotide
  modified_base 92: mod_base = OTHER; note = 2'-O-methyl modified nucleotide
  modified_base 93: mod_base = OTHER; note = 2'-O-methyl modified nucleotide
  modified_base 94: mod_base = OTHER; note = 2'-O-methyl modified nucleotide
  modified_base 95: mod_base = OTHER; note = 2'-O-methyl modified nucleotide
  modified_base 96: mod_base = OTHER; note = 2'-O-methyl modified nucleotide
  modified_base 118: mod_base = OTHER; note = Nucleotide with phosphorothioate linkage
  modified_base 119: mod_base = OTHER; note = 2'-O-methyl modified nucleotide with phosphorothioate linkage
  modified_base 120: mod_base = OTHER; note = 2'-O-methyl modified nucleotide with phosphorothioate linkage
  modified_base 121: mod_base = OTHER; note = 2'-O-methyl modified nucleotide
gctggtacacggcagggtcagttttagagctagaaatagcaagttaaaataaggctagtccgttatcaacttgaaaaagtggcaccgagtcggtgcaaccctagtgtgaccctgccgtgta

SEQ ID NO: 16591 - RNA, 120 nt, synthetic construct
  source 1..120: mol_type = other RNA
  modified_base 1: mod_base = OTHER; note = 2'-O-methyl modified nucleotide with phosphorothioate linkage
  modified_base 2: mod_base = OTHER; note = 2'-O-methyl modified nucleotide with phosphorothioate linkage
  modified_base 3: mod_base = OTHER; note = 2'-O-methyl modified nucleotide with phosphorothioate linkage
  modified_base 29: mod_base = OTHER; note = 2'-O-methyl modified nucleotide
  modified_base 30: mod_base = OTHER; note = 2'-O-methyl modified nucleotide
  modified_base 31: mod_base = OTHER; note = 2'-O-methyl modified nucleotide
  modified_base 32: mod_base = OTHER; note = 2'-O-methyl modified nucleotide
  modified_base 33: mod_base = OTHER; note = 2'-O-methyl modified nucleotide
  modified_base 34: mod_base = OTHER; note = 2'-O-methyl modified nucleotide
  modified_base 35: mod_base = OTHER; note = 2'-O-methyl modified nucleotide
  modified_base 36: mod_base = OTHER; note = 2'-O-methyl modified nucleotide
  modified_base 37: mod_base = OTHER; note = 2'-O-methyl modified nucleotide
  modified_base 38: mod_base = OTHER; note = 2'-O-methyl modified nucleotide
  modified_base 39: mod_base = OTHER; note = 2'-O-methyl modified nucleotide
  modified_base 40: mod_base = OTHER; note = 2'-O-methyl modified nucleotide
  modified_base 69: mod_base = OTHER; note = 2'-O-methyl modified nucleotide
  modified_base 70: mod_base = OTHER; note = 2'-O-methyl modified nucleotide
  modified_base 71: mod_base = OTHER; note = 2'-O-methyl modified nucleotide
  modified_base 72: mod_base = OTHER; note = 2'-O-methyl modified nucleotide
  modified_base 73: mod_base = OTHER; note = 2'-O-methyl modified nucleotide
  modified_base 74: mod_base = OTHER; note = 2'-O-methyl modified nucleotide
  modified_base 75: mod_base = OTHER; note = 2'-O-methyl modified nucleotide
  modified_base 76: mod_base = OTHER; note = 2'-O-methyl modified nucleotide
  modified_base 77: mod_base = OTHER; note = 2'-O-methyl modified nucleotide
  modified_base 78: mod_base = OTHER; note = 2'-O-methyl modified nucleotide
  modified_base 79: mod_base = OTHER; note = 2'-O-methyl modified nucleotide
  modified_base 80: mod_base = OTHER; note = 2'-O-methyl modified nucleotide
  modified_base 81: mod_base = OTHER; note = 2'-O-methyl modified nucleotide
  modified_base 82: mod_base = OTHER; note = 2'-O-methyl modified nucleotide
  modified_base 83: mod_base = OTHER; note = 2'-O-methyl modified nucleotide
  modified_base 84: mod_base = OTHER; note = 2'-O-methyl modified nucleotide
  modified_base 85: mod_base = OTHER; note = 2'-O-methyl modified nucleotide
  modified_base 86: mod_base = OTHER; note = 2'-O-methyl modified nucleotide
  modified_base 87: mod_base = OTHER; note = 2'-O-methyl modified nucleotide
  modified_base 88: mod_base = OTHER; note = 2'-O-methyl modified nucleotide
  modified_base 89: mod_base = OTHER; note = 2'-O-methyl modified nucleotide
  modified_base 90: mod_base = OTHER; note = 2'-O-methyl modified nucleotide
  modified_base 91: mod_base = OTHER; note = 2'-O-methyl modified nucleotide
  modified_base 92: mod_base = OTHER; note = 2'-O-methyl modified nucleotide
  modified_base 93: mod_base = OTHER; note = 2'-O-methyl modified nucleotide
  modified_base 94: mod_base = OTHER; note = 2'-O-methyl modified nucleotide
  modified_base 95: mod_base = OTHER; note = 2'-O-methyl modified nucleotide
  modified_base 96: mod_base = OTHER; note = 2'-O-methyl modified nucleotide
  modified_base 117: mod_base = OTHER; note = Nucleotide with phosphorothioate linkage
  modified_base 118: mod_base = OTHER; note = 2'-O-methyl modified nucleotide with phosphorothioate linkage
  modified_base 119: mod_base = OTHER; note = 2'-O-methyl modified nucleotide with phosphorothioate linkage
  modified_base 120: mod_base = OTHER; note = 2'-O-methyl modified nucleotide
gctggtacacggcagggtcagttttagagctagaaatagcaagttaaaataaggctagtccgttatcaacttgaaaaagtggcaccgagtcggtgcaaccctagtgtgaccctgccgtgt

SEQ ID NO: 16592 - RNA, 119 nt, synthetic construct
  source 1..119: mol_type = other RNA
  modified_base 1: mod_base = OTHER; note = 2'-O-methyl modified nucleotide with phosphorothioate linkage
  modified_base 2: mod_base = OTHER; note = 2'-O-methyl modified nucleotide with phosphorothioate linkage
  modified_base 3: mod_base = OTHER; note = 2'-O-methyl modified nucleotide with phosphorothioate linkage
  modified_base 29: mod_base = OTHER; note = 2'-O-methyl modified nucleotide
  modified_base 30: mod_base = OTHER; note = 2'-O-methyl modified nucleotide
  modified_base 31: mod_base = OTHER; note = 2'-O-methyl modified nucleotide
  modified_base 32: mod_base = OTHER; note = 2'-O-methyl modified nucleotide
  modified_base 33: mod_base = OTHER; note = 2'-O-methyl modified nucleotide
  modified_base 34: mod_base = OTHER; note = 2'-O-methyl modified nucleotide
  modified_base 35: mod_base = OTHER; note = 2'-O-methyl modified nucleotide
  modified_base 36: mod_base = OTHER; note = 2'-O-methyl modified nucleotide
  modified_base 37: mod_base = OTHER; note = 2'-O-methyl modified nucleotide
  modified_base 38: mod_base = OTHER; note = 2'-O-methyl modified nucleotide
  modified_base 39: mod_base = OTHER; note = 2'-O-methyl modified nucleotide
  modified_base 40: mod_base = OTHER; note = 2'-O-methyl modified nucleotide
  modified_base 69: mod_base = OTHER; note = 2'-O-methyl modified nucleotide
  modified_base 70: mod_base = OTHER; note = 2'-O-methyl modified nucleotide
  modified_base 71: mod_base = OTHER; note = 2'-O-methyl modified nucleotide
  modified_base 72: mod_base = OTHER; note = 2'-O-methyl modified nucleotide
  modified_base 73: mod_base = OTHER; note = 2'-O-methyl modified nucleotide
  modified_base 74: mod_base = OTHER; note = 2'-O-methyl modified nucleotide
  modified_base 75: mod_base = OTHER; note = 2'-O-methyl modified nucleotide
  modified_base 76: mod_base = OTHER; note = 2'-O-methyl modified nucleotide
  modified_base 77: mod_base = OTHER; note = 2'-O-methyl modified nucleotide
  modified_base 78: mod_base = OTHER; note = 2'-O-methyl modified nucleotide
  modified_base 79: mod_base = OTHER; note = 2'-O-methyl modified nucleotide
  modified_base 80: mod_base = OTHER; note = 2'-O-methyl modified nucleotide
  modified_base 81: mod_base = OTHER; note = 2'-O-methyl modified nucleotide
  modified_base 82: mod_base = OTHER; note = 2'-O-methyl modified nucleotide
  modified_base 83: mod_base = OTHER; note = 2'-O-methyl modified nucleotide
  modified_base 84: mod_base = OTHER; note = 2'-O-methyl modified nucleotide
  modified_base 85: mod_base = OTHER; note = 2'-O-methyl modified nucleotide
  modified_base 86: mod_base = OTHER; note = 2'-O-methyl modified nucleotide
  modified_base 87: mod_base = OTHER; note = 2'-O-methyl modified nucleotide
  modified_base 88: mod_base = OTHER; note = 2'-O-methyl modified nucleotide
  modified_base 89: mod_base = OTHER; note = 2'-O-methyl modified nucleotide
  modified_base 90: mod_base = OTHER; note = 2'-O-methyl modified nucleotide
  modified_base 91: mod_base = OTHER; note = 2'-O-methyl modified nucleotide
  modified_base 92: mod_base = OTHER; note = 2'-O-methyl modified nucleotide
  modified_base 93: mod_base = OTHER; note = 2'-O-methyl modified nucleotide
  modified_base 94: mod_base = OTHER; note = 2'-O-methyl modified nucleotide
  modified_base 95: mod_base = OTHER; note = 2'-O-methyl modified nucleotide
  modified_base 96: mod_base = OTHER; note = 2'-O-methyl modified nucleotide
  modified_base 116: mod_base = OTHER; note = Nucleotide with phosphorothioate linkage
  modified_base 117: mod_base = OTHER; note = 2'-O-methyl modified nucleotide with phosphorothioate linkage
  modified_base 118: mod_base = OTHER; note = 2'-O-methyl modified nucleotide with phosphorothioate linkage
  modified_base 119: mod_base = OTHER; note = 2'-O-methyl modified nucleotide
gctggtacacggcagggtcagttttagagctagaaatagcaagttaaaataaggctagtccgttatcaacttgaaaaagtggcaccgagtcggtgcaaccctagtgtgaccctgccgtg

SEQ ID NO: 16593 - RNA, 118 nt, synthetic construct
  source 1..118: mol_type = other RNA
  modified_base 1: mod_base = OTHER; note = 2'-O-methyl modified nucleotide with phosphorothioate linkage
  modified_base 2: mod_base = OTHER; note = 2'-O-methyl modified nucleotide with phosphorothioate linkage
  modified_base 3: mod_base = OTHER; note = 2'-O-methyl modified nucleotide with phosphorothioate linkage
  modified_base 29: mod_base = OTHER; note = 2'-O-methyl modified nucleotide
  modified_base 30: mod_base = OTHER; note = 2'-O-methyl modified nucleotide
  modified_base 31: mod_base = OTHER; note = 2'-O-methyl modified nucleotide
  modified_base 32: mod_base = OTHER; note = 2'-O-methyl modified nucleotide
  modified_base 33: mod_base = OTHER; note = 2'-O-methyl modified nucleotide
  modified_base 34: mod_base = OTHER; note = 2'-O-methyl modified nucleotide
  modified_base 35: mod_base = OTHER; note = 2'-O-methyl modified nucleotide
  modified_base 36: mod_base = OTHER; note = 2'-O-methyl modified nucleotide
  modified_base 37: mod_base = OTHER; note = 2'-O-methyl modified nucleotide
  modified_base 38: mod_base = OTHER; note = 2'-O-methyl modified nucleotide
  modified_base 39: mod_base = OTHER; note = 2'-O-methyl modified nucleotide
  modified_base 40: mod_base = OTHER; note = 2'-O-methyl modified nucleotide
  modified_base 69: mod_base = OTHER; note = 2'-O-methyl modified nucleotide
  modified_base 70: mod_base = OTHER; note = 2'-O-methyl modified nucleotide
  modified_base 71: mod_base = OTHER; note = 2'-O-methyl modified nucleotide
  modified_base 72: mod_base = OTHER; note = 2'-O-methyl modified nucleotide
  modified_base 73: mod_base = OTHER; note = 2'-O-methyl modified nucleotide
  modified_base 74: mod_base = OTHER; note = 2'-O-methyl modified nucleotide
  modified_base 75: mod_base = OTHER; note = 2'-O-methyl modified nucleotide
  modified_base 76: mod_base = OTHER; note = 2'-O-methyl modified nucleotide
  modified_base 77: mod_base = OTHER; note = 2'-O-methyl modified nucleotide
  modified_base 78: mod_base = OTHER; note = 2'-O-methyl modified nucleotide
  modified_base 79: mod_base = OTHER; note = 2'-O-methyl modified nucleotide
  modified_base 80: mod_base = OTHER; note = 2'-O-methyl modified nucleotide
  modified_base 81: mod_base = OTHER; note = 2'-O-methyl modified nucleotide
  modified_base 82: mod_base = OTHER; note = 2'-O-methyl modified nucleotide
  modified_base 83: mod_base = OTHER; note = 2'-O-methyl modified nucleotide
  modified_base 84: mod_base = OTHER; note = 2'-O-methyl modified nucleotide
  modified_base 85: mod_base = OTHER; note = 2'-O-methyl modified nucleotide
  modified_base 86: mod_base = OTHER; note = 2'-O-methyl modified nucleotide
  modified_base 87: mod_base = OTHER; note = 2'-O-methyl modified nucleotide
  modified_base 88: mod_base = OTHER; note = 2'-O-methyl modified nucleotide
  modified_base 89: mod_base = OTHER; note = 2'-O-methyl modified nucleotide
  modified_base 90: mod_base = OTHER; note = 2'-O-methyl modified nucleotide
  modified_base 91: mod_base = OTHER; note = 2'-O-methyl modified nucleotide
  modified_base 92: mod_base = OTHER; note = 2'-O-methyl modified nucleotide
  modified_base 93: mod_base = OTHER; note = 2'-O-methyl modified nucleotide
  modified_base 94: mod_base = OTHER; note = 2'-O-methyl modified nucleotide
  modified_base 95: mod_base = OTHER; note = 2'-O-methyl modified nucleotide
  modified_base 96: mod_base = OTHER; note = 2'-O-methyl modified nucleotide
  modified_base 115: mod_base = OTHER; note = Nucleotide with phosphorothioate linkage
  modified_base 116: mod_base = OTHER; note = 2'-O-methyl modified nucleotide with phosphorothioate linkage
  modified_base 117: mod_base = OTHER; note = 2'-O-methyl modified nucleotide with phosphorothioate linkage
  modified_base 118: mod_base = OTHER; note = 2'-O-methyl modified nucleotide
gctggtacacggcagggtcagttttagagctagaaatagcaagttaaaataaggctagtccgttatcaacttgaaaaagtggcaccgagtcggtgcaaccctagtgtgaccctgccgt

SEQ ID NO: 16594 - RNA, 117 nt, synthetic construct
  source 1..117: mol_type = other RNA
  modified_base 1: mod_base = OTHER; note = 2'-O-methyl modified nucleotide with phosphorothioate linkage
  modified_base 2: mod_base = OTHER; note = 2'-O-methyl modified nucleotide with phosphorothioate linkage
  modified_base 3: mod_base = OTHER; note = 2'-O-methyl modified nucleotide with phosphorothioate linkage
  modified_base 29: mod_base = OTHER; note = 2'-O-methyl modified nucleotide
  modified_base 30: mod_base = OTHER; note = 2'-O-methyl modified nucleotide
  modified_base 31: mod_base = OTHER; note = 2'-O-methyl modified nucleotide
  modified_base 32: mod_base = OTHER; note = 2'-O-methyl modified nucleotide
  modified_base 33: mod_base = OTHER; note = 2'-O-methyl modified nucleotide
  modified_base 34: mod_base = OTHER; note = 2'-O-methyl modified nucleotide
  modified_base 35: mod_base = OTHER; note = 2'-O-methyl modified nucleotide
  modified_base 36: mod_base = OTHER; note = 2'-O-methyl modified nucleotide
  modified_base 37: mod_base = OTHER; note = 2'-O-methyl modified nucleotide
  modified_base 38: mod_base = OTHER; note = 2'-O-methyl modified nucleotide
  modified_base 39: mod_base = OTHER; note = 2'-O-methyl modified nucleotide
  modified_base 40: mod_base = OTHER; note = 2'-O-methyl modified nucleotide
  modified_base 69: mod_base = OTHER; note = 2'-O-methyl modified nucleotide
  modified_base 70: mod_base = OTHER; note = 2'-O-methyl modified nucleotide
  modified_base 71: mod_base = OTHER; note = 2'-O-methyl modified nucleotide
  modified_base 72: mod_base = OTHER; note = 2'-O-methyl modified nucleotide
  modified_base 73: mod_base = OTHER; note = 2'-O-methyl modified nucleotide
  modified_base 74: mod_base = OTHER; note = 2'-O-methyl modified nucleotide
  modified_base 75: mod_base = OTHER; note = 2'-O-methyl modified nucleotide
  modified_base 76: mod_base = OTHER; note = 2'-O-methyl modified nucleotide
  modified_base 77: mod_base = OTHER; note = 2'-O-methyl modified nucleotide
  modified_base 78: mod_base = OTHER; note = 2'-O-methyl modified nucleotide
  modified_base 79: mod_base = OTHER; note = 2'-O-methyl modified nucleotide
  modified_base 80: mod_base = OTHER; note = 2'-O-methyl modified nucleotide
  modified_base 81: mod_base = OTHER; note = 2'-O-methyl modified nucleotide
  modified_base 82: mod_base = OTHER; note = 2'-O-methyl modified nucleotide
  modified_base 83: mod_base = OTHER; note = 2'-O-methyl modified nucleotide
  modified_base 84: mod_base = OTHER; note = 2'-O-methyl modified nucleotide
  modified_base 85: mod_base = OTHER; note = 2'-O-methyl modified nucleotide
  modified_base 86: mod_base = OTHER; note = 2'-O-methyl modified nucleotide
  modified_base 87: mod_base = OTHER; note = 2'-O-methyl modified nucleotide
  modified_base 88: mod_base = OTHER; note = 2'-O-methyl modified nucleotide
  modified_base 89: mod_base = OTHER; note = 2'-O-methyl modified nucleotide
  modified_base 90: mod_base = OTHER; note = 2'-O-methyl modified nucleotide
  modified_base 91: mod_base = OTHER; note = 2'-O-methyl modified nucleotide
  modified_base 92: mod_base = OTHER; note = 2'-O-methyl modified nucleotide
  modified_base 93: mod_base = OTHER; note = 2'-O-methyl modified nucleotide
  modified_base 94: mod_base = OTHER; note = 2'-O-methyl modified nucleotide
  modified_base 95: mod_base = OTHER; note = 2'-O-methyl modified nucleotide
  modified_base 96: mod_base = OTHER; note = 2'-O-methyl modified nucleotide
  modified_base 114: mod_base = OTHER; note = Nucleotide with phosphorothioate linkage
  modified_base 115: mod_base = OTHER; note = 2'-O-methyl modified nucleotide with phosphorothioate linkage
  modified_base 116: mod_base = OTHER; note = 2'-O-methyl modified nucleotide with phosphorothioate linkage
  modified_base 117: mod_base = OTHER; note = 2'-O-methyl modified nucleotide
gctggtacacggcagggtcagttttagagctagaaatagcaagttaaaataaggctagtccgttatcaacttgaaaaagtggcaccgagtcggtgcaaccctagtgtgaccctgccg

SEQ ID NO: 16595 - RNA, 124 nt, synthetic construct
  source 1..124: mol_type = other RNA
  modified_base 1: mod_base = OTHER; note = 2'-O-methyl modified nucleotide with phosphorothioate linkage
  modified_base 2: mod_base = OTHER; note = 2'-O-methyl modified nucleotide with phosphorothioate linkage
  modified_base 3: mod_base = OTHER; note = 2'-O-methyl modified nucleotide with phosphorothioate linkage
  modified_base 29: mod_base = OTHER; note = 2'-O-methyl modified nucleotide
  modified_base 30: mod_base = OTHER; note = 2'-O-methyl modified nucleotide
  modified_base 31: mod_base = OTHER; note = 2'-O-methyl modified nucleotide
  modified_base 32: mod_base = OTHER; note = 2'-O-methyl modified nucleotide
  modified_base 33: mod_base = OTHER; note = 2'-O-methyl modified nucleotide
  modified_base 34: mod_base = OTHER; note = 2'-O-methyl modified nucleotide
  modified_base 35: mod_base = OTHER; note = 2'-O-methyl modified nucleotide
  modified_base 36: mod_base = OTHER; note = 2'-O-methyl modified nucleotide
  modified_base 37: mod_base = OTHER; note = 2'-O-methyl modified nucleotide
  modified_base 38: mod_base = OTHER; note = 2'-O-methyl modified nucleotide
  modified_base 39: mod_base = OTHER; note = 2'-O-methyl modified nucleotide
  modified_base 40: mod_base = OTHER; note = 2'-O-methyl modified nucleotide
  modified_base 69: mod_base = OTHER; note = 2'-O-methyl modified nucleotide
  modified_base 70: mod_base = OTHER; note = 2'-O-methyl modified nucleotide
  modified_base 71: mod_base = OTHER; note = 2'-O-methyl modified nucleotide
  modified_base 72: mod_base = OTHER; note = 2'-O-methyl modified nucleotide
  modified_base 73: mod_base = OTHER; note = 2'-O-methyl modified nucleotide
  modified_base 74: mod_base = OTHER; note = 2'-O-methyl modified nucleotide
  modified_base 75: mod_base = OTHER; note = 2'-O-methyl modified nucleotide
  modified_base 76: mod_base = OTHER; note = 2'-O-methyl modified nucleotide
  modified_base 77: mod_base = OTHER; note = 2'-O-methyl modified nucleotide
  modified_base 78: mod_base = OTHER; note = 2'-O-methyl modified nucleotide
  modified_base 79: mod_base = OTHER; note = 2'-O-methyl modified nucleotide
  modified_base 80: mod_base = OTHER; note = 2'-O-methyl modified nucleotide
  modified_base 81: mod_base = OTHER; note = 2'-O-methyl modified nucleotide
  modified_base 82: mod_base = OTHER; note = 2'-O-methyl modified nucleotide
  modified_base 83: mod_base = OTHER; note = 2'-O-methyl modified nucleotide
  modified_base 84: mod_base = OTHER; note = 2'-O-methyl modified nucleotide
  modified_base 85: mod_base = OTHER; note = 2'-O-methyl modified nucleotide
  modified_base 86: mod_base = OTHER; note = 2'-O-methyl modified nucleotide
  modified_base 87: mod_base = OTHER; note = 2'-O-methyl modified nucleotide
  modified_base 88: mod_base = OTHER; note = 2'-O-methyl modified nucleotide
  modified_base 89: mod_base = OTHER; note = 2'-O-methyl modified nucleotide
  modified_base 90: mod_base = OTHER; note = 2'-O-methyl modified nucleotide
  modified_base 91: mod_base = OTHER; note = 2'-O-methyl modified nucleotide
  modified_base 92: mod_base = OTHER; note = 2'-O-methyl modified nucleotide
  modified_base 93: mod_base = OTHER; note = 2'-O-methyl modified nucleotide
  modified_base 94: mod_base = OTHER; note = 2'-O-methyl modified nucleotide
  modified_base 95: mod_base = OTHER; note = 2'-O-methyl modified nucleotide
  modified_base 96: mod_base = OTHER; note = 2'-O-methyl modified nucleotide
  modified_base 121: mod_base = OTHER; note = Nucleotide with phosphorothioate linkage
  modified_base 122: mod_base = OTHER; note = 2'-O-methyl modified nucleotide with phosphorothioate linkage
  modified_base 123: mod_base = OTHER; note = 2'-O-methyl modified nucleotide with phosphorothioate linkage
  modified_base 124: mod_base = OTHER; note = 2'-O-methyl modified nucleotide
gctggtacacggcagggtcagttttagagctagaaatagcaagttaaaataaggctagtccgttatcaacttgaaaaagtggcaccgagtcggtgcagaaccctagtgtgaccctgccgtgtac

SEQ ID NO: 16596 - RNA, 123 nt, synthetic construct
  source 1..123: mol_type = other RNA
  modified_base 1: mod_base = OTHER; note = 2'-O-methyl modified nucleotide with phosphorothioate linkage
  modified_base 2: mod_base = OTHER; note = 2'-O-methyl modified nucleotide with phosphorothioate linkage
  modified_base 3: mod_base = OTHER; note = 2'-O-methyl modified nucleotide with phosphorothioate linkage
  modified_base 29: mod_base = OTHER; note = 2'-O-methyl modified nucleotide
  modified_base 30: mod_base = OTHER; note = 2'-O-methyl modified nucleotide
  modified_base 31: mod_base = OTHER; note = 2'-O-methyl modified nucleotide
  modified_base 32: mod_base = OTHER; note = 2'-O-methyl modified nucleotide
  modified_base 33: mod_base = OTHER; note = 2'-O-methyl modified nucleotide
  modified_base 34: mod_base = OTHER; note = 2'-O-methyl modified nucleotide
  modified_base 35: mod_base = OTHER; note = 2'-O-methyl modified nucleotide
  modified_base 36: mod_base = OTHER; note = 2'-O-methyl modified nucleotide
  modified_base 37: mod_base = OTHER; note = 2'-O-methyl modified nucleotide
  modified_base 38: mod_base = OTHER; note = 2'-O-methyl modified nucleotide
  modified_base 39: mod_base = OTHER; note = 2'-O-methyl modified nucleotide
  modified_base 40: mod_base = OTHER; note = 2'-O-methyl modified nucleotide
  modified_base 69: mod_base = OTHER; note = 2'-O-methyl modified nucleotide
  modified_base 70: mod_base = OTHER; note = 2'-O-methyl modified nucleotide
  modified_base 71: mod_base = OTHER; note = 2'-O-methyl modified nucleotide
  modified_base 72: mod_base = OTHER; note = 2'-O-methyl modified nucleotide
  modified_base 73: mod_base = OTHER; note = 2'-O-methyl modified nucleotide
  modified_base 74: mod_base = OTHER; note = 2'-O-methyl modified nucleotide
  modified_base 75: mod_base = OTHER; note = 2'-O-methyl modified nucleotide
  modified_base 76: mod_base = OTHER; note = 2'-O-methyl modified nucleotide
  modified_base 77: mod_base = OTHER; note = 2'-O-methyl modified nucleotide
  modified_base 78: mod_base = OTHER; note = 2'-O-methyl modified nucleotide
  modified_base 79: mod_base = OTHER; note = 2'-O-methyl modified nucleotide
  modified_base 80: mod_base = OTHER; note = 2'-O-methyl modified nucleotide
  modified_base 81: mod_base = OTHER; note = 2'-O-methyl modified nucleotide
  modified_base 82: mod_base = OTHER; note = 2'-O-methyl modified nucleotide
  modified_base 83: mod_base = OTHER; note = 2'-O-methyl modified nucleotide
  modified_base 84: mod_base = OTHER; note = 2'-O-methyl modified nucleotide
  modified_base 85: mod_base = OTHER; note = 2'-O-methyl modified nucleotide
  modified_base 86: mod_base = OTHER; note = 2'-O-methyl modified nucleotide
  modified_base 87: mod_base = OTHER; note = 2'-O-methyl modified nucleotide
  modified_base 88: mod_base = OTHER; note = 2'-O-methyl modified nucleotide
  modified_base 89: mod_base = OTHER; note = 2'-O-methyl modified nucleotide
  modified_base 90: mod_base = OTHER; note = 2'-O-methyl modified nucleotide
  modified_base 91: mod_base = OTHER; note = 2'-O-methyl modified nucleotide
  modified_base 92: mod_base = OTHER; note = 2'-O-methyl modified nucleotide
  modified_base 93: mod_base = OTHER; note = 2'-O-methyl modified nucleotide
  modified_base 94: mod_base = OTHER; note = 2'-O-methyl modified nucleotide
  modified_base 95: mod_base = OTHER; note = 2'-O-methyl modified nucleotide
  modified_base 96: mod_base = OTHER; note = 2'-O-methyl modified nucleotide
  modified_base 120: mod_base = OTHER; note = Nucleotide with phosphorothioate linkage
  modified_base 121: mod_base = OTHER; note = 2'-O-methyl modified nucleotide with phosphorothioate linkage
  modified_base 122: mod_base = OTHER; note = 2'-O-methyl modified nucleotide with phosphorothioate linkage
  modified_base 123: mod_base = OTHER; note = 2'-O-methyl modified nucleotide
gctggtacacggcagggtcagttttagagctagaaatagcaagttaaaataaggctagtccgttatcaacttgaaaaagtggcaccgagtcggtgcagaaccctagtgtgaccctgccgtgta

SEQ ID NO: 16597 - RNA, 122 nt, synthetic construct
  source 1..122: mol_type = other RNA
  modified_base 1: mod_base = OTHER; note = 2'-O-methyl modified nucleotide with phosphorothioate linkage
  modified_base 2: mod_base = OTHER; note = 2'-O-methyl modified nucleotide with phosphorothioate linkage
  modified_base 3: mod_base = OTHER; note = 2'-O-methyl modified nucleotide with phosphorothioate linkage
  modified_base 29: mod_base = OTHER; note = 2'-O-methyl modified nucleotide
  modified_base 30: mod_base = OTHER; note = 2'-O-methyl modified nucleotide
  modified_base 31: mod_base = OTHER; note = 2'-O-methyl modified nucleotide
  modified_base 32: mod_base = OTHER; note = 2'-O-methyl modified nucleotide
  modified_base 33: mod_base = OTHER; note = 2'-O-methyl modified nucleotide
  modified_base 34: mod_base = OTHER; note = 2'-O-methyl modified nucleotide
  modified_base 35: mod_base = OTHER; note = 2'-O-methyl modified nucleotide
  modified_base 36: mod_base = OTHER; note = 2'-O-methyl modified nucleotide
  modified_base 37: mod_base = OTHER; note = 2'-O-methyl modified nucleotide
  modified_base 38: mod_base = OTHER; note = 2'-O-methyl modified nucleotide
  modified_base 39: mod_base = OTHER; note = 2'-O-methyl modified nucleotide
  modified_base 40: mod_base = OTHER; note = 2'-O-methyl modified nucleotide
  modified_base 69: mod_base = OTHER; note = 2'-O-methyl modified nucleotide
  modified_base 70: mod_base = OTHER; note = 2'-O-methyl modified nucleotide
  modified_base 71: mod_base = OTHER; note = 2'-O-methyl modified nucleotide
  modified_base 72: mod_base = OTHER; note = 2'-O-methyl modified nucleotide
  modified_base 73: mod_base = OTHER; note = 2'-O-methyl modified nucleotide
  modified_base 74: mod_base = OTHER; note = 2'-O-methyl modified nucleotide
  modified_base 75: mod_base = OTHER; note = 2'-O-methyl modified nucleotide
  modified_base 76: mod_base = OTHER; note = 2'-O-methyl modified nucleotide
  modified_base 77: mod_base = OTHER; note = 2'-O-methyl modified nucleotide
  modified_base 78: mod_base = OTHER; note = 2'-O-methyl modified nucleotide
  modified_base 79: mod_base = OTHER; note = 2'-O-methyl modified nucleotide
  modified_base 80: mod_base = OTHER; note = 2'-O-methyl modified nucleotide
  modified_base 81: mod_base = OTHER; note = 2'-O-methyl modified nucleotide
  modified_base 82: mod_base = OTHER; note = 2'-O-methyl modified nucleotide
  modified_base 83: mod_base = OTHER; note = 2'-O-methyl modified nucleotide
  modified_base 84: mod_base = OTHER; note = 2'-O-methyl modified nucleotide
  modified_base 85: mod_base = OTHER; note = 2'-O-methyl modified nucleotide
  modified_base 86: mod_base = OTHER; note = 2'-O-methyl modified nucleotide
  modified_base 87: mod_base = OTHER; note = 2'-O-methyl modified nucleotide
  modified_base 88: mod_base = OTHER; note = 2'-O-methyl modified nucleotide
  modified_base 89: mod_base = OTHER; note = 2'-O-methyl modified nucleotide
  modified_base 90: mod_base = OTHER; note = 2'-O-methyl modified nucleotide
  modified_base 91: mod_base = OTHER; note = 2'-O-methyl modified nucleotide
  modified_base 92: mod_base = OTHER; note = 2'-O-methyl modified nucleotide
  modified_base 93: mod_base = OTHER; note = 2'-O-methyl modified nucleotide
  modified_base 94: mod_base = OTHER; note = 2'-O-methyl modified nucleotide
  modified_base 95: mod_base = OTHER; note = 2'-O-methyl modified nucleotide
  modified_base 96: mod_base = OTHER; note = 2'-O-methyl modified nucleotide
  modified_base 119: mod_base = OTHER; note = Nucleotide with phosphorothioate linkage
  modified_base 120: mod_base = OTHER; note = 2'-O-methyl modified nucleotide with phosphorothioate linkage
  modified_base 121: mod_base = OTHER; note = 2'-O-methyl modified nucleotide with phosphorothioate linkage
  modified_base 122: mod_base = OTHER; note = 2'-O-methyl modified nucleotide
gctggtacacggcagggtcagttttagagctagaaatagcaagttaaaataaggctagtccgttatcaacttgaaaaagtggcaccgagtcggtgcagaaccctagtgtgaccctgccgtgt

SEQ ID NO: 16598 - RNA, 121 nt, synthetic construct
  source 1..121: mol_type = other RNA
  modified_base 1: mod_base = OTHER; note = 2'-O-methyl modified nucleotide with phosphorothioate linkage
  modified_base 2: mod_base = OTHER; note = 2'-O-methyl modified nucleotide with phosphorothioate linkage
  modified_base 3: mod_base = OTHER; note = 2'-O-methyl modified nucleotide with phosphorothioate linkage
  modified_base 29: mod_base = OTHER; note = 2'-O-methyl modified nucleotide
  modified_base 30: mod_base = OTHER; note = 2'-O-methyl modified nucleotide
  modified_base 31: mod_base = OTHER; note = 2'-O-methyl modified nucleotide
  modified_base 32: mod_base = OTHER; note = 2'-O-methyl modified nucleotide
  modified_base 33: mod_base = OTHER; note = 2'-O-methyl modified nucleotide
  modified_base 34: mod_base = OTHER; note = 2'-O-methyl modified nucleotide
  modified_base 35: mod_base = OTHER; note = 2'-O-methyl modified nucleotide
  modified_base 36: mod_base = OTHER; note = 2'-O-methyl modified nucleotide
  modified_base 37: mod_base = OTHER; note = 2'-O-methyl modified nucleotide
  modified_base 38: mod_base = OTHER; note = 2'-O-methyl modified nucleotide
  modified_base 39: mod_base = OTHER; note = 2'-O-methyl modified nucleotide
  modified_base 40: mod_base = OTHER; note = 2'-O-methyl modified nucleotide
  modified_base 69: mod_base = OTHER; note = 2'-O-methyl modified nucleotide
  modified_base 70: mod_base = OTHER; note = 2'-O-methyl modified nucleotide
  modified_base 71: mod_base = OTHER; note = 2'-O-methyl modified nucleotide
  modified_base 72: mod_base = OTHER; note = 2'-O-methyl modified nucleotide
  modified_base 73: mod_base = OTHER; note = 2'-O-methyl modified nucleotide
  modified_base 74: mod_base = OTHER; note = 2'-O-methyl modified nucleotide
  modified_base 75: mod_base = OTHER; note = 2'-O-methyl modified nucleotide
  modified_base 76: mod_base = OTHER; note = 2'-O-methyl modified nucleotide
  modified_base 77: mod_base = OTHER; note = 2'-O-methyl modified nucleotide
  modified_base 78: mod_base = OTHER; note = 2'-O-methyl modified nucleotide
  modified_base 79: mod_base = OTHER; note = 2'-O-methyl modified nucleotide
  modified_base 80: mod_base = OTHER; note = 2'-O-methyl modified nucleotide
  modified_base 81: mod_base = OTHER; note = 2'-O-methyl modified nucleotide
  modified_base 82: mod_base = OTHER; note = 2'-O-methyl modified nucleotide
  modified_base 83: mod_base = OTHER; note = 2'-O-methyl modified nucleotide
  modified_base 84: mod_base = OTHER; note = 2'-O-methyl modified nucleotide
  modified_base 85: mod_base = OTHER; note = 2'-O-methyl modified nucleotide
  modified_base 86: mod_base = OTHER; note = 2'-O-methyl modified nucleotide
  modified_base 87: mod_base = OTHER; note = 2'-O-methyl modified nucleotide
  modified_base 88: mod_base = OTHER; note = 2'-O-methyl modified nucleotide
  modified_base 89: mod_base = OTHER; note = 2'-O-methyl modified nucleotide
  modified_base 90: mod_base = OTHER; note = 2'-O-methyl modified nucleotide
  modified_base 91: mod_base = OTHER; note = 2'-O-methyl modified nucleotide
  modified_base 92: mod_base = OTHER; note = 2'-O-methyl modified nucleotide
  modified_base 93: mod_base = OTHER; note = 2'-O-methyl modified nucleotide
  modified_base 94: mod_base = OTHER; note = 2'-O-methyl modified nucleotide
  modified_base 95: mod_base = OTHER; note = 2'-O-methyl modified nucleotide
  modified_base 96: mod_base = OTHER; note = 2'-O-methyl modified nucleotide
  modified_base 118: mod_base = OTHER; note = Nucleotide with phosphorothioate linkage
  modified_base 119: mod_base = OTHER; note = 2'-O-methyl modified nucleotide with phosphorothioate linkage
  modified_base 120: mod_base = OTHER; note = 2'-O-methyl modified nucleotide with phosphorothioate linkage
  modified_base 121: mod_base = OTHER; note = 2'-O-methyl modified nucleotide
gctggtacacggcagggtcagttttagagctagaaatagcaagttaaaataaggctagtccgttatcaacttgaaaaagtggcaccgagtcggtgcagaaccctagtgtgaccctgccgtg

SEQ ID NO: 16599 - RNA, 120 nt, synthetic construct
  source 1..120: mol_type = other RNA
  modified_base 1: mod_base = OTHER; note = 2'-O-methyl modified nucleotide with phosphorothioate linkage
  modified_base 2: mod_base = OTHER; note = 2'-O-methyl modified nucleotide with phosphorothioate linkage
  modified_base 3: mod_base = OTHER; note = 2'-O-methyl modified nucleotide with phosphorothioate linkage
  modified_base 29: mod_base = OTHER; note = 2'-O-methyl modified nucleotide
  modified_base 30: mod_base = OTHER; note = 2'-O-methyl modified nucleotide
  modified_base 31: mod_base = OTHER; note = 2'-O-methyl modified nucleotide
  modified_base 32: mod_base = OTHER; note = 2'-O-methyl modified nucleotide
  modified_base 33: mod_base = OTHER; note = 2'-O-methyl modified nucleotide
  modified_base 34: mod_base = OTHER; note = 2'-O-methyl modified nucleotide
  modified_base 35: mod_base = OTHER; note = 2'-O-methyl modified nucleotide
  modified_base 36: mod_base = OTHER; note = 2'-O-methyl modified nucleotide
  modified_base 37: mod_base = OTHER; note = 2'-O-methyl modified nucleotide
  modified_base 38: mod_base = OTHER; note = 2'-O-methyl modified nucleotide
  modified_base 39: mod_base = OTHER; note = 2'-O-methyl modified nucleotide
  modified_base 40: mod_base = OTHER; note = 2'-O-methyl modified nucleotide
  modified_base 69: mod_base = OTHER; note = 2'-O-methyl modified nucleotide
  modified_base 70: mod_base = OTHER; note = 2'-O-methyl modified nucleotide
  modified_base 71: mod_base = OTHER; note = 2'-O-methyl modified nucleotide
  modified_base 72: mod_base = OTHER; note = 2'-O-methyl modified nucleotide
  modified_base 73: mod_base = OTHER; note = 2'-O-methyl modified nucleotide
  modified_base 74: mod_base = OTHER; note = 2'-O-methyl modified nucleotide
  modified_base 75: mod_base = OTHER; note = 2'-O-methyl modified nucleotide
  modified_base 76: mod_base = OTHER; note = 2'-O-methyl modified nucleotide
  modified_base 77: mod_base = OTHER; note = 2'-O-methyl modified nucleotide
  modified_base 78: mod_base = OTHER; note = 2'-O-methyl modified nucleotide
  modified_base 79: mod_base = OTHER; note = 2'-O-methyl modified nucleotide
  modified_base 80: mod_base = OTHER; note = 2'-O-methyl modified nucleotide
  modified_base 81: mod_base = OTHER; note = 2'-O-methyl modified nucleotide
  modified_base 82: mod_base = OTHER; note = 2'-O-methyl modified nucleotide
  modified_base 83: mod_base = OTHER; note = 2'-O-methyl modified nucleotide
  modified_base 84: mod_base = OTHER; note = 2'-O-methyl modified nucleotide
  modified_base 85: mod_base = OTHER; note = 2'-O-methyl modified nucleotide
  modified_base 86: mod_base = OTHER; note = 2'-O-methyl modified nucleotide
  modified_base 87: mod_base = OTHER; note = 2'-O-methyl modified nucleotide
  modified_base 88: mod_base = OTHER; note = 2'-O-methyl modified nucleotide
  modified_base 89: mod_base = OTHER; note = 2'-O-methyl modified nucleotide
  modified_base 90: mod_base = OTHER; note = 2'-O-methyl modified nucleotide
  modified_base 91: mod_base = OTHER; note = 2'-O-methyl modified nucleotide
  modified_base 92: mod_base = OTHER; note = 2'-O-methyl modified nucleotide
  modified_base 93: mod_base = OTHER; note = 2'-O-methyl modified nucleotide
  modified_base 94: mod_base = OTHER; note = 2'-O-methyl modified nucleotide
  modified_base 95: mod_base = OTHER; note = 2'-O-methyl modified nucleotide
  modified_base 96: mod_base = OTHER; note = 2'-O-methyl modified nucleotide
  modified_base 117: mod_base = OTHER; note = Nucleotide with phosphorothioate linkage
  modified_base 118: mod_base = OTHER; note = 2'-O-methyl modified nucleotide with phosphorothioate linkage
  modified_base 119: mod_base = OTHER; note = 2'-O-methyl modified nucleotide with phosphorothioate linkage
  modified_base 120: mod_base = OTHER; note = 2'-O-methyl modified nucleotide
gctggtacacggcagggtcagttttagagctagaaatagcaagttaaaataaggctagtccgttatcaacttgaaaaagtggcaccgagtcggtgcagaaccctagtgtgaccctgccgt

SEQ ID NO: 16600 - RNA, 119 nt, synthetic construct
  source 1..119: mol_type = other RNA
  modified_base 1: mod_base = OTHER; note = 2'-O-methyl modified nucleotide with phosphorothioate linkage
  modified_base 2: mod_base = OTHER; note = 2'-O-methyl modified nucleotide with phosphorothioate linkage
  modified_base 3: mod_base = OTHER; note = 2'-O-methyl modified nucleotide with phosphorothioate linkage
  modified_base 29: mod_base = OTHER; note = 2'-O-methyl modified nucleotide
  modified_base 30: mod_base = OTHER; note = 2'-O-methyl modified nucleotide
  modified_base 31: mod_base = OTHER; note = 2'-O-methyl modified nucleotide
  modified_base 32: mod_base = OTHER; note = 2'-O-methyl modified nucleotide
  modified_base 33: mod_base = OTHER; note = 2'-O-methyl modified nucleotide
  modified_base 34: mod_base = OTHER; note = 2'-O-methyl modified nucleotide
  modified_base 35: mod_base = OTHER; note = 2'-O-methyl modified nucleotide
  modified_base 36: mod_base = OTHER; note = 2'-O-methyl modified nucleotide
  modified_base 37: mod_base = OTHER; note = 2'-O-methyl modified nucleotide
  modified_base 38: mod_base = OTHER; note = 2'-O-methyl modified nucleotide
  modified_base 39: mod_base = OTHER; note = 2'-O-methyl modified nucleotide
  modified_base 40: mod_base = OTHER; note = 2'-O-methyl modified nucleotide
  modified_base 69: mod_base = OTHER; note = 2'-O-methyl modified nucleotide
  modified_base 70: mod_base = OTHER; note = 2'-O-methyl modified nucleotide
  modified_base 71: mod_base = OTHER; note = 2'-O-methyl modified nucleotide
  modified_base 72: mod_base = OTHER; note = 2'-O-methyl modified nucleotide
  modified_base 73: mod_base = OTHER; note = 2'-O-methyl modified nucleotide
  modified_base 74: mod_base = OTHER; note = 2'-O-methyl modified nucleotide
  modified_base 75: mod_base = OTHER; note = 2'-O-methyl modified nucleotide
  modified_base 76: mod_base = OTHER; note = 2'-O-methyl modified nucleotide
  modified_base 77: mod_base = OTHER; note = 2'-O-methyl modified nucleotide
  modified_base 78: mod_base = OTHER; note = 2'-O-methyl modified nucleotide
  modified_base 79: mod_base = OTHER; note = 2'-O-methyl modified nucleotide
  modified_base 80: mod_base = OTHER; note = 2'-O-methyl modified nucleotide
  modified_base 81: mod_base = OTHER; note = 2'-O-methyl modified nucleotide
  modified_base 82: mod_base = OTHER; note = 2'-O-methyl modified nucleotide
  modified_base 83: mod_base = OTHER; note = 2'-O-methyl modified nucleotide
  modified_base 84: mod_base = OTHER; note = 2'-O-methyl modified nucleotide
  modified_base 85: mod_base = OTHER; note = 2'-O-methyl modified nucleotide
  modified_base 86: mod_base = OTHER; note = 2'-O-methyl modified nucleotide
  modified_base 87: mod_base = OTHER; note = 2'-O-methyl modified nucleotide
  modified_base 88: mod_base = OTHER; note = 2'-O-methyl modified nucleotide
  modified_base 89: mod_base = OTHER; note = 2'-O-methyl modified nucleotide
  modified_base 90: mod_base = OTHER; note = 2'-O-methyl modified nucleotide
  modified_base 91: mod_base = OTHER; note = 2'-O-methyl modified nucleotide
  modified_base 92: mod_base = OTHER; note = 2'-O-methyl modified nucleotide
  modified_base 93: mod_base = OTHER; note = 2'-O-methyl modified nucleotide
  modified_base 94: mod_base = OTHER; note = 2'-O-methyl modified nucleotide
  modified_base 95: mod_base = OTHER; note = 2'-O-methyl modified nucleotide
  modified_base 96: mod_base = OTHER; note = 2'-O-methyl modified nucleotide
  modified_base 116: mod_base = OTHER; note = Nucleotide with phosphorothioate linkage
  modified_base 117: mod_base = OTHER; note = 2'-O-methyl modified nucleotide with phosphorothioate linkage
  modified_base 118: mod_base = OTHER; note = 2'-O-methyl modified nucleotide with phosphorothioate linkage
  modified_base 119: mod_base = OTHER; note = 2'-O-methyl modified nucleotide
gctggtacacggcagggtcagttttagagctagaaatagcaagttaaaataaggctagtccgttatcaacttgaaaaagtggcaccgagtcggtgcagaaccctagtgtgaccctgccg

SEQ ID NO: 16601 - RNA, 126 nt, synthetic construct
  source 1..126: mol_type = other RNA
  modified_base 1: mod_base = OTHER; note = 2'-O-methyl modified nucleotide with phosphorothioate linkage
  modified_base 2: mod_base = OTHER; note = 2'-O-methyl modified nucleotide with phosphorothioate linkage
  modified_base 3: mod_base = OTHER; note = 2'-O-methyl modified nucleotide with phosphorothioate linkage
  modified_base 29: mod_base = OTHER; note = 2'-O-methyl modified nucleotide
  modified_base 30: mod_base = OTHER; note = 2'-O-methyl modified nucleotide
  modified_base 31: mod_base = OTHER; note = 2'-O-methyl modified nucleotide
  modified_base 32: mod_base = OTHER; note = 2'-O-methyl modified nucleotide
  modified_base 33: mod_base = OTHER; note = 2'-O-methyl modified nucleotide
  modified_base 34: mod_base = OTHER; note = 2'-O-methyl modified nucleotide
  modified_base 35: mod_base = OTHER; note = 2'-O-methyl modified nucleotide
  modified_base 36: mod_base = OTHER; note = 2'-O-methyl modified nucleotide
  modified_base 37: mod_base = OTHER; note = 2'-O-methyl modified nucleotide
  modified_base 38: mod_base = OTHER; note = 2'-O-methyl modified nucleotide
  modified_base 39: mod_base = OTHER; note = 2'-O-methyl modified nucleotide
  modified_base 40: mod_base = OTHER; note = 2'-O-methyl modified nucleotide
  modified_base 69: mod_base = OTHER; note = 2'-O-methyl modified nucleotide
  modified_base 70: mod_base = OTHER; note = 2'-O-methyl modified nucleotide
  modified_base 71: mod_base = OTHER; note = 2'-O-methyl modified nucleotide
  modified_base 72: mod_base = OTHER; note = 2'-O-methyl modified nucleotide
  modified_base 73: mod_base = OTHER; note = 2'-O-methyl modified nucleotide
  modified_base 74: mod_base = OTHER; note = 2'-O-methyl modified nucleotide
  modified_base 75: mod_base = OTHER; note = 2'-O-methyl modified nucleotide
  modified_base 76: mod_base = OTHER; note = 2'-O-methyl modified nucleotide
  modified_base 77: mod_base = OTHER; note = 2'-O-methyl modified nucleotide
  modified_base 78: mod_base = OTHER; note = 2'-O-methyl modified nucleotide
  modified_base 79: mod_base = OTHER; note = 2'-O-methyl modified nucleotide
  modified_base 80: mod_base = OTHER; note = 2'-O-methyl modified nucleotide
  modified_base 81: mod_base = OTHER; note = 2'-O-methyl modified nucleotide
  modified_base 82: mod_base = OTHER; note = 2'-O-methyl modified nucleotide
  modified_base 83: mod_base = OTHER; note = 2'-O-methyl modified nucleotide
  modified_base 84: mod_base = OTHER; note = 2'-O-methyl modified nucleotide
  modified_base 85: mod_base = OTHER; note = 2'-O-methyl modified nucleotide
  modified_base 86: mod_base = OTHER; note = 2'-O-methyl modified nucleotide
  modified_base 87: mod_base = OTHER; note = 2'-O-methyl modified nucleotide
  modified_base 88: mod_base = OTHER; note = 2'-O-methyl modified nucleotide
  modified_base 89: mod_base = OTHER; note = 2'-O-methyl modified nucleotide
  modified_base 90: mod_base = OTHER; note = 2'-O-methyl modified nucleotide
  modified_base 91: mod_base = OTHER; note = 2'-O-methyl modified nucleotide
  modified_base 92: mod_base = OTHER; note = 2'-O-methyl modified nucleotide
  modified_base 93: mod_base = OTHER; note = 2'-O-methyl modified nucleotide
  modified_base 94: mod_base = OTHER; note = 2'-O-methyl modified nucleotide
  modified_base 95: mod_base = OTHER; note = 2'-O-methyl modified nucleotide
  modified_base 96: mod_base = OTHER; note = 2'-O-methyl modified nucleotide
  modified_base 123: mod_base = OTHER; note = Nucleotide with phosphorothioate linkage
  modified_base 124: mod_base = OTHER; note = 2'-O-methyl modified nucleotide with phosphorothioate linkage
  modified_base 125: mod_base = OTHER; note = 2'-O-methyl modified nucleotide with phosphorothioate linkage
  modified_base 126: mod_base = OTHER; note = 2'-O-methyl modified nucleotide
gctggtacacggcagggtcagttttagagctagaaatagcaagttaaaataaggctagtccgttatcaacttgaaaaagtggcaccgagtcggtgcccagaaccctagtgtgaccctgccgtgtac

SEQ ID NO: 16602 - RNA, 125 nt, synthetic construct
  source 1..125: mol_type = other RNA
  modified_base 1: mod_base = OTHER; note = 2'-O-methyl modified nucleotide with phosphorothioate linkage
  modified_base 2: mod_base = OTHER; note = 2'-O-methyl modified nucleotide with phosphorothioate linkage
  modified_base 3: mod_base = OTHER; note = 2'-O-methyl modified nucleotide with phosphorothioate linkage
  modified_base 29: mod_base = OTHER; note = 2'-O-methyl modified nucleotide
  modified_base 30: mod_base = OTHER; note = 2'-O-methyl modified nucleotide
  modified_base 31: mod_base = OTHER; note = 2'-O-methyl modified nucleotide
  modified_base 32: mod_base = OTHER; note = 2'-O-methyl modified nucleotide
  modified_base 33: mod_base = OTHER; note = 2'-O-methyl modified nucleotide
  modified_base 34: mod_base = OTHER; note = 2'-O-methyl modified nucleotide
  modified_base 35: mod_base = OTHER; note = 2'-O-methyl modified nucleotide
  modified_base 36: mod_base = OTHER; note = 2'-O-methyl modified nucleotide
  modified_base 37: mod_base = OTHER; note = 2'-O-methyl modified nucleotide
  modified_base 38: mod_base = OTHER; note = 2'-O-methyl modified nucleotide
  modified_base 39: mod_base = OTHER; note = 2'-O-methyl modified nucleotide
  modified_base 40: mod_base = OTHER; note = 2'-O-methyl modified nucleotide
  modified_base 69: mod_base = OTHER; note = 2'-O-methyl modified nucleotide
  modified_base 70: mod_base = OTHER; note = 2'-O-methyl modified nucleotide
  modified_base 71: mod_base = OTHER; note = 2'-O-methyl modified nucleotide
  modified_base 72: mod_base = OTHER; note = 2'-O-methyl modified nucleotide
  modified_base 73: mod_base = OTHER; note = 2'-O-methyl modified nucleotide
  modified_base 74: mod_base = OTHER; note = 2'-O-methyl modified nucleotide
  modified_base 75: mod_base = OTHER; note = 2'-O-methyl modified nucleotide
  modified_base 76: mod_base = OTHER; note = 2'-O-methyl modified nucleotide
  modified_base 77: mod_base = OTHER; note = 2'-O-methyl modified nucleotide
  modified_base 78: mod_base = OTHER; note = 2'-O-methyl modified nucleotide
  modified_base 79: mod_base = OTHER; note = 2'-O-methyl modified nucleotide
  modified_base 80: mod_base = OTHER; note = 2'-O-methyl modified nucleotide
  modified_base 81: mod_base = OTHER; note = 2'-O-methyl modified nucleotide
  modified_base 82: mod_base = OTHER; note = 2'-O-methyl modified nucleotide
  modified_base 83: mod_base = OTHER; note = 2'-O-methyl modified nucleotide
  modified_base 84: mod_base = OTHER; note = 2'-O-methyl modified nucleotide
  modified_base 85: mod_base = OTHER; note = 2'-O-methyl modified nucleotide
  modified_base 86: mod_base = OTHER; note = 2'-O-methyl modified nucleotide
  modified_base 87: mod_base = OTHER; note = 2'-O-methyl modified nucleotide
  modified_base 88: mod_base = OTHER; note = 2'-O-methyl modified nucleotide
  modified_base 89: mod_base = OTHER; note = 2'-O-methyl modified nucleotide
  modified_base 90: mod_base = OTHER; note = 2'-O-methyl modified nucleotide
  modified_base 91: mod_base = OTHER; note = 2'-O-methyl modified nucleotide
  modified_base 92: mod_base = OTHER; note = 2'-O-methyl modified nucleotide
  modified_base 93: mod_base = OTHER; note = 2'-O-methyl modified nucleotide
  modified_base 94: mod_base = OTHER; note = 2'-O-methyl modified nucleotide
  modified_base 95: mod_base = OTHER; note = 2'-O-methyl modified nucleotide
  modified_base 96: mod_base = OTHER; note = 2'-O-methyl modified nucleotide
  modified_base 122: mod_base = OTHER; note = Nucleotide with phosphorothioate linkage
  modified_base 123: mod_base = OTHER; note = 2'-O-methyl modified nucleotide with phosphorothioate linkage
  modified_base 124: mod_base = OTHER; note = 2'-O-methyl modified nucleotide with phosphorothioate linkage
  modified_base 125: mod_base = OTHER; note = 2'-O-methyl modified nucleotide
gctggtacacggcagggtcagttttagagctagaaatagcaagttaaaataaggctagtccgttatcaacttgaaaaagtggcaccgagtcggtgcccagaaccctagtgtgaccctgccgtgta

SEQ ID NO: 16603 - RNA, 124 nt, synthetic construct
  source 1..124: mol_type = other RNA
  modified_base 1: mod_base = OTHER; note = 2'-O-methyl modified nucleotide with phosphorothioate linkage
  modified_base 2: mod_base = OTHER; note = 2'-O-methyl modified nucleotide with phosphorothioate linkage
  modified_base 3: mod_base = OTHER; note = 2'-O-methyl modified nucleotide with phosphorothioate linkage
  modified_base 29: mod_base = OTHER; note = 2'-O-methyl modified nucleotide
  modified_base 30: mod_base = OTHER; note = 2'-O-methyl modified nucleotide
  modified_base 31: mod_base = OTHER; note = 2'-O-methyl modified nucleotide
  modified_base 32: mod_base = OTHER; note = 2'-O-methyl modified nucleotide
  modified_base 33: mod_base = OTHER; note = 2'-O-methyl modified nucleotide
  modified_base 34: mod_base = OTHER; note = 2'-O-methyl modified nucleotide
  modified_base 35: mod_base = OTHER; note = 2'-O-methyl modified nucleotide
  modified_base 36: mod_base = OTHER; note = 2'-O-methyl modified nucleotide
  modified_base 37: mod_base = OTHER; note = 2'-O-methyl modified nucleotide
  modified_base 38: mod_base = OTHER; note = 2'-O-methyl modified nucleotide
  modified_base 39: mod_base = OTHER; note = 2'-O-methyl modified nucleotide
  modified_base 40: mod_base = OTHER; note = 2'-O-methyl modified nucleotide
  modified_base 69: mod_base = OTHER; note = 2'-O-methyl modified nucleotide
  modified_base 70: mod_base = OTHER; note = 2'-O-methyl modified nucleotide
  modified_base 71: mod_base = OTHER; note = 2'-O-methyl modified nucleotide
  modified_base 72: mod_base = OTHER; note = 2'-O-methyl modified nucleotide
  modified_base 73: mod_base = OTHER; note = 2'-O-methyl modified nucleotide
  modified_base 74: mod_base = OTHER; note = 2'-O-methyl modified nucleotide
  modified_base 75: mod_base = OTHER; note = 2'-O-methyl modified nucleotide
  modified_base 76: mod_base = OTHER; note = 2'-O-methyl modified nucleotide
  modified_base 77: mod_base = OTHER; note = 2'-O-methyl modified nucleotide
  modified_base 78: mod_base = OTHER; note = 2'-O-methyl modified nucleotide
  modified_base 79: mod_base = OTHER; note = 2'-O-methyl modified nucleotide
  modified_base 80: mod_base = OTHER; note = 2'-O-methyl modified nucleotide
  modified_base 81: mod_base = OTHER; note = 2'-O-methyl modified nucleotide
  modified_base 82: mod_base = OTHER; note = 2'-O-methyl modified nucleotide
  modified_base 83: mod_base = OTHER; note = 2'-O-methyl modified nucleotide
  modified_base 84: mod_base = OTHER; note = 2'-O-methyl modified nucleotide
  modified_base 85: mod_base = OTHER; note = 2'-O-methyl modified nucleotide
  modified_base 86: mod_base = OTHER; note = 2'-O-methyl modified nucleotide
  modified_base 87: mod_base = OTHER; note = 2'-O-methyl modified nucleotide
  modified_base 88: mod_base = OTHER; note = 2'-O-methyl modified nucleotide
  modified_base 89: mod_base = OTHER; note = 2'-O-methyl modified nucleotide
  modified_base 90: mod_base = OTHER; note = 2'-O-methyl modified nucleotide
  modified_base 91: mod_base = OTHER; note = 2'-O-methyl modified nucleotide
  modified_base 92: mod_base = OTHER; note = 2'-O-methyl modified nucleotide
  modified_base 93: mod_base = OTHER; note = 2'-O-methyl modified nucleotide
  modified_base 94: mod_base = OTHER; note = 2'-O-methyl modified nucleotide
  modified_base 95: mod_base = OTHER; note = 2'-O-methyl modified nucleotide
  modified_base 96: mod_base = OTHER; note = 2'-O-methyl modified nucleotide
  modified_base 121: mod_base = OTHER; note = Nucleotide with phosphorothioate linkage
  modified_base 122: mod_base = OTHER; note = 2'-O-methyl modified nucleotide with phosphorothioate linkage
  modified_base 123: mod_base = OTHER; note = 2'-O-methyl modified nucleotide with phosphorothioate linkage
  modified_base 124: mod_base = OTHER; note = 2'-O-methyl modified nucleotide
gctggtacacggcagggtcagttttagagctagaaatagcaagttaaaataaggctagtccgttatcaacttgaaaaagtggcaccgagtcggtgcccagaaccctagtgtgaccctgccgtgt

SEQ ID NO: 16604 - RNA, 123 nt, synthetic construct
  source 1..123: mol_type = other RNA
  modified_base 1: mod_base = OTHER; note = 2'-O-methyl modified nucleotide with phosphorothioate linkage
  modified_base 2: mod_base = OTHER; note = 2'-O-methyl modified nucleotide with phosphorothioate linkage
  modified_base 3: mod_base = OTHER; note = 2'-O-methyl modified nucleotide with phosphorothioate linkage
  modified_base 29: mod_base = OTHER; note = 2'-O-methyl modified nucleotide
  modified_base 30: mod_base = OTHER; note = 2'-O-methyl modified nucleotide
  modified_base 31: mod_base = OTHER; note = 2'-O-methyl modified nucleotide
  modified_base 32: mod_base = OTHER; note = 2'-O-methyl modified nucleotide
  modified_base 33: mod_base = OTHER; note = 2'-O-methyl modified nucleotide
  modified_base 34: mod_base = OTHER; note = 2'-O-methyl modified nucleotide
  modified_base 35: mod_base = OTHER; note = 2'-O-methyl modified nucleotide
  modified_base 36: mod_base = OTHER; note = 2'-O-methyl modified nucleotide
  modified_base 37: mod_base = OTHER; note = 2'-O-methyl modified nucleotide
  modified_base 38: mod_base = OTHER; note = 2'-O-methyl modified nucleotide
  modified_base 39: mod_base = OTHER; note = 2'-O-methyl modified nucleotide
  modified_base 40: mod_base = OTHER; note = 2'-O-methyl modified nucleotide
  modified_base 69: mod_base = OTHER; note = 2'-O-methyl modified nucleotide
  modified_base 70: mod_base = OTHER; note = 2'-O-methyl modified nucleotide
  modified_base 71: mod_base = OTHER; note = 2'-O-methyl modified nucleotide
  modified_base 72: mod_base = OTHER; note = 2'-O-methyl modified nucleotide
  modified_base 73: mod_base = OTHER; note = 2'-O-methyl modified nucleotide
  modified_base 74: mod_base = OTHER; note = 2'-O-methyl modified nucleotide
  modified_base 75: mod_base = OTHER; note = 2'-O-methyl modified nucleotide
  modified_base 76: mod_base = OTHER; note = 2'-O-methyl modified nucleotide
  modified_base 77: mod_base = OTHER; note = 2'-O-methyl modified nucleotide
  modified_base 78: mod_base = OTHER; note = 2'-O-methyl modified nucleotide
  modified_base 79: mod_base = OTHER; note = 2'-O-methyl modified nucleotide
  modified_base 80: mod_base = OTHER; note = 2'-O-methyl modified nucleotide
  modified_base 81: mod_base = OTHER; note = 2'-O-methyl modified nucleotide
  modified_base 82: mod_base = OTHER; note = 2'-O-methyl modified nucleotide
  modified_base 83: mod_base = OTHER; note = 2'-O-methyl modified nucleotide
  modified_base 84: mod_base = OTHER; note = 2'-O-methyl modified nucleotide
  modified_base 85: mod_base = OTHER; note = 2'-O-methyl modified nucleotide
  modified_base 86: mod_base = OTHER; note = 2'-O-methyl modified nucleotide
  modified_base 87: mod_base = OTHER; note = 2'-O-methyl modified nucleotide
  modified_base 88: mod_base = OTHER; note = 2'-O-methyl modified nucleotide
  modified_base 89: mod_base = OTHER; note = 2'-O-methyl modified nucleotide
  modified_base 90: mod_base = OTHER; note = 2'-O-methyl modified nucleotide
  modified_base 91: mod_base = OTHER; note = 2'-O-methyl modified nucleotide
  modified_base 92: mod_base = OTHER; note = 2'-O-methyl modified nucleotide
  modified_base 93: mod_base = OTHER; note = 2'-O-methyl modified nucleotide
  modified_base 94: mod_base = OTHER; note = 2'-O-methyl modified nucleotide
  modified_base 95: mod_base = OTHER; note = 2'-O-methyl modified nucleotide
  modified_base 96: mod_base = OTHER; note = 2'-O-methyl modified nucleotide
  modified_base 120: mod_base = OTHER; note = Nucleotide with phosphorothioate linkage
  modified_base 121: mod_base = OTHER; note = 2'-O-methyl modified nucleotide with phosphorothioate linkage
  modified_base 122: mod_base = OTHER; note = 2'-O-methyl modified nucleotide with phosphorothioate linkage
  modified_base 123: mod_base = OTHER; note = 2'-O-methyl modified nucleotide
gctggtacacggcagggtcagttttagagctagaaatagcaagttaaaataaggctagtccgttatcaacttgaaaaagtggcaccgagtcggtgcccagaaccctagtgtgaccctgccgtg

SEQ ID NO: 16605 - RNA, 122 nt, synthetic construct
  source 1..122: mol_type = other RNA
  modified_base 1: mod_base = OTHER; note = 2'-O-methyl modified nucleotide with phosphorothioate linkage
  modified_base 2: mod_base = OTHER; note = 2'-O-methyl modified nucleotide with phosphorothioate linkage
  modified_base 3: mod_base = OTHER; note = 2'-O-methyl modified nucleotide with phosphorothioate linkage
  modified_base 29: mod_base = OTHER; note = 2'-O-methyl modified nucleotide
  modified_base 30: mod_base = OTHER; note = 2'-O-methyl modified nucleotide
  modified_base 31: mod_base = OTHER; note = 2'-O-methyl modified nucleotide
  modified_base 32: mod_base = OTHER; note = 2'-O-methyl modified nucleotide
  modified_base 33: mod_base = OTHER; note = 2'-O-methyl modified nucleotide
  modified_base 34: mod_base = OTHER; note = 2'-O-methyl modified nucleotide
  modified_base 35: mod_base = OTHER; note = 2'-O-methyl modified nucleotide
  modified_base 36: mod_base = OTHER; note = 2'-O-methyl modified nucleotide
  modified_base 37: mod_base = OTHER; note = 2'-O-methyl modified nucleotide
  modified_base 38: mod_base = OTHER; note = 2'-O-methyl modified nucleotide
  modified_base 39: mod_base = OTHER; note = 2'-O-methyl modified nucleotide
  modified_base 40: mod_base = OTHER; note = 2'-O-methyl modified nucleotide
  modified_base 69: mod_base = OTHER; note = 2'-O-methyl modified nucleotide
  modified_base 70: mod_base = OTHER; note = 2'-O-methyl modified nucleotide
  modified_base 71: mod_base = OTHER; note = 2'-O-methyl modified nucleotide
  modified_base 72: mod_base = OTHER; note = 2'-O-methyl modified nucleotide
  modified_base 73: mod_base = OTHER; note = 2'-O-methyl modified nucleotide
  modified_base 74: mod_base = OTHER; note = 2'-O-methyl modified nucleotide
  modified_base 75: mod_base = OTHER; note = 2'-O-methyl modified nucleotide
  modified_base 76: mod_base = OTHER; note = 2'-O-methyl modified nucleotide
  modified_base 77: mod_base = OTHER; note = 2'-O-methyl modified nucleotide
  modified_base 78: mod_base = OTHER; note = 2'-O-methyl modified nucleotide
  modified_base 79: mod_base = OTHER; note = 2'-O-methyl modified nucleotide
  modified_base 80: mod_base = OTHER; note = 2'-O-methyl modified nucleotide
  modified_base 81: mod_base = OTHER; note = 2'-O-methyl modified nucleotide
  modified_base 82: mod_base = OTHER; note = 2'-O-methyl modified nucleotide
  modified_base 83: mod_base = OTHER; note = 2'-O-methyl modified nucleotide
  modified_base 84: mod_base = OTHER; note = 2'-O-methyl modified nucleotide
  modified_base 85: mod_base = OTHER; note = 2'-O-methyl modified nucleotide
  modified_base 86: mod_base = OTHER; note = 2'-O-methyl modified nucleotide
  modified_base 87: mod_base = OTHER; note = 2'-O-methyl modified nucleotide
  modified_base 88: mod_base = OTHER; note = 2'-O-methyl modified nucleotide
  modified_base 89: mod_base = OTHER; note = 2'-O-methyl modified nucleotide
  modified_base 90: mod_base = OTHER; note = 2'-O-methyl modified nucleotide
  modified_base 91: mod_base = OTHER; note = 2'-O-methyl modified nucleotide
  modified_base 92: mod_base = OTHER; note = 2'-O-methyl modified nucleotide
  modified_base 93: mod_base = OTHER; note = 2'-O-methyl modified nucleotide
  modified_base 94: mod_base = OTHER; note = 2'-O-methyl modified nucleotide
  modified_base 95: mod_base = OTHER; note = 2'-O-methyl modified nucleotide
  modified_base 96: mod_base = OTHER; note = 2'-O-methyl modified nucleotide
  modified_base 119: mod_base = OTHER; note = Nucleotide with phosphorothioate linkage
  modified_base 120: mod_base = OTHER; note = 2'-O-methyl modified nucleotide with phosphorothioate linkage
  modified_base 121: mod_base = OTHER; note = 2'-O-methyl modified nucleotide with phosphorothioate linkage
  modified_base 122: mod_base = OTHER; note = 2'-O-methyl modified nucleotide
gctggtacacggcagggtcagttttagagctagaaatagcaagttaaaataaggctagtccgttatcaacttgaaaaagtggcaccgagtcggtgcccagaaccctagtgtgaccctgccgt

SEQ ID NO: 16606 - RNA, 121 nt, synthetic construct
  source 1..121: mol_type = other RNA
  modified_base 1: mod_base = OTHER; note = 2'-O-methyl modified nucleotide with phosphorothioate linkage
  modified_base 2: mod_base = OTHER; note = 2'-O-methyl modified nucleotide with phosphorothioate linkage
  modified_base 3: mod_base = OTHER; note = 2'-O-methyl modified nucleotide with phosphorothioate linkage
  modified_base 29: mod_base = OTHER; note = 2'-O-methyl modified nucleotide
  modified_base 30: mod_base = OTHER; note = 2'-O-methyl modified nucleotide
  modified_base 31: mod_base = OTHER; note = 2'-O-methyl modified nucleotide
  modified_base 32: mod_base = OTHER; note = 2'-O-methyl modified nucleotide
  modified_base 33: mod_base = OTHER; note = 2'-O-methyl modified nucleotide
  modified_base 34: mod_base = OTHER; note = 2'-O-methyl modified nucleotide
  modified_base 35: mod_base = OTHER; note = 2'-O-methyl modified nucleotide
  modified_base 36: mod_base = OTHER; note = 2'-O-methyl modified nucleotide
  modified_base 37: mod_base = OTHER; note = 2'-O-methyl modified nucleotide
  modified_base 38: mod_base = OTHER; note = 2'-O-methyl modified nucleotide
  modified_base 39: mod_base = OTHER; note = 2'-O-methyl modified nucleotide
  modified_base 40: mod_base = OTHER; note = 2'-O-methyl modified nucleotide
  modified_base 69: mod_base = OTHER; note = 2'-O-methyl modified nucleotide
  modified_base 70: mod_base = OTHER; note = 2'-O-methyl modified nucleotide
  modified_base 71: mod_base = OTHER; note = 2'-O-methyl modified nucleotide
  modified_base 72: mod_base = OTHER; note = 2'-O-methyl modified nucleotide
  modified_base 73: mod_base = OTHER; note = 2'-O-methyl modified nucleotide
  modified_base 74: mod_base = OTHER; note = 2'-O-methyl modified nucleotide
  modified_base 75: mod_base = OTHER; note = 2'-O-methyl modified nucleotide
  modified_base 76: mod_base = OTHER; note = 2'-O-methyl modified nucleotide
  modified_base 77: mod_base = OTHER; note = 2'-O-methyl modified nucleotide
  modified_base 78: mod_base = OTHER; note = 2'-O-methyl modified nucleotide
  modified_base 79: mod_base = OTHER; note = 2'-O-methyl modified nucleotide
  modified_base 80: mod_base = OTHER; note = 2'-O-methyl modified nucleotide
  modified_base 81: mod_base = OTHER; note = 2'-O-methyl modified nucleotide
  modified_base 82: mod_base = OTHER; note = 2'-O-methyl modified nucleotide
  modified_base 83: mod_base = OTHER; note = 2'-O-methyl modified nucleotide
  modified_base 84: mod_base = OTHER; note = 2'-O-methyl modified nucleotide
  modified_base 85: mod_base = OTHER; note = 2'-O-methyl modified nucleotide
  modified_base 86: mod_base = OTHER; note = 2'-O-methyl modified nucleotide
  modified_base 87: mod_base = OTHER; note = 2'-O-methyl modified nucleotide
  modified_base 88: mod_base = OTHER; note = 2'-O-methyl modified nucleotide
  modified_base 89: mod_base = OTHER; note = 2'-O-methyl modified nucleotide
  modified_base 90: mod_base = OTHER; note = 2'-O-methyl modified nucleotide
  modified_base 91: mod_base = OTHER; note = 2'-O-methyl modified nucleotide
  modified_base 92: mod_base = OTHER; note = 2'-O-methyl modified nucleotide
  modified_base 93: mod_base = OTHER; note = 2'-O-methyl modified nucleotide
  modified_base 94: mod_base = OTHER; note = 2'-O-methyl modified nucleotide
  modified_base 95: mod_base = OTHER; note = 2'-O-methyl modified nucleotide
  modified_base 96: mod_base = OTHER; note = 2'-O-methyl modified nucleotide
  modified_base 118: mod_base = OTHER; note = Nucleotide with phosphorothioate linkage
  modified_base 119: mod_base = OTHER; note = 2'-O-methyl modified nucleotide with phosphorothioate linkage
  modified_base 120: mod_base = OTHER; note = 2'-O-methyl modified nucleotide with phosphorothioate linkage
  modified_base 121: mod_base = OTHER; note = 2'-O-methyl modified nucleotide
gctggtacacggcagggtcagttttagagctagaaatagcaagttaaaataaggctagtccgttatcaacttgaaaaagtggcaccgagtcggtgcccagaaccctagtgtgaccctgccg

SEQ ID NO: 16607 - RNA, 128 nt, synthetic construct
  source 1..128: mol_type = other RNA
  modified_base 1: mod_base = OTHER; note = 2'-O-methyl modified nucleotide with phosphorothioate linkage
  modified_base 2: mod_base = OTHER; note = 2'-O-methyl modified nucleotide with phosphorothioate linkage
  modified_base 3: mod_base = OTHER; note = 2'-O-methyl modified nucleotide with phosphorothioate linkage
  modified_base 29: mod_base = OTHER; note = 2'-O-methyl modified nucleotide
  modified_base 30: mod_base = OTHER; note = 2'-O-methyl modified nucleotide
  modified_base 31: mod_base = OTHER; note = 2'-O-methyl modified nucleotide
  modified_base 32: mod_base = OTHER; note = 2'-O-methyl modified nucleotide
  modified_base 33: mod_base = OTHER; note = 2'-O-methyl modified nucleotide
  modified_base 34: mod_base = OTHER; note = 2'-O-methyl modified nucleotide
  modified_base 35: mod_base = OTHER; note = 2'-O-methyl modified nucleotide
  modified_base 36: mod_base = OTHER; note = 2'-O-methyl modified nucleotide
  modified_base 37: mod_base = OTHER; note = 2'-O-methyl modified nucleotide
  modified_base 38: mod_base = OTHER; note = 2'-O-methyl modified nucleotide
  modified_base 39: mod_base = OTHER; note = 2'-O-methyl modified nucleotide
  modified_base 40: mod_base = OTHER; note = 2'-O-methyl modified nucleotide
  modified_base 69: mod_base = OTHER; note = 2'-O-methyl modified nucleotide
  modified_base 70: mod_base = OTHER; note = 2'-O-methyl modified nucleotide
  modified_base 71: mod_base = OTHER; note = 2'-O-methyl modified nucleotide
  modified_base 72: mod_base = OTHER; note = 2'-O-methyl modified nucleotide
  modified_base 73: mod_base = OTHER; note = 2'-O-methyl modified nucleotide
  modified_base 74: mod_base = OTHER; note = 2'-O-methyl modified nucleotide
  modified_base 75: mod_base = OTHER; note = 2'-O-methyl modified nucleotide
  modified_base 76: mod_base = OTHER; note = 2'-O-methyl modified nucleotide
  modified_base 77: mod_base = OTHER; note = 2'-O-methyl modified nucleotide
  modified_base 78: mod_base = OTHER; note = 2'-O-methyl modified nucleotide
  modified_base 79: mod_base = OTHER; note = 2'-O-methyl modified nucleotide
  modified_base 80: mod_base = OTHER; note = 2'-O-methyl modified nucleotide
  modified_base 81: mod_base = OTHER; note = 2'-O-methyl modified nucleotide
  modified_base 82: mod_base = OTHER; note = 2'-O-methyl modified nucleotide
  modified_base 83: mod_base = OTHER; note = 2'-O-methyl modified nucleotide
  modified_base 84: mod_base = OTHER; note = 2'-O-methyl modified nucleotide
  modified_base 85: mod_base = OTHER; note = 2'-O-methyl modified nucleotide
  modified_base 86: mod_base = OTHER; note = 2'-O-methyl modified nucleotide
  modified_base 87: mod_base = OTHER; note = 2'-O-methyl modified nucleotide
  modified_base 88: mod_base = OTHER; note = 2'-O-methyl modified nucleotide
  modified_base 89: mod_base = OTHER; note = 2'-O-methyl modified nucleotide
  modified_base 90: mod_base = OTHER; note = 2'-O-methyl modified nucleotide
  modified_base 91: mod_base = OTHER; note = 2'-O-methyl modified nucleotide
  modified_base 92: mod_base = OTHER; note = 2'-O-methyl modified nucleotide
  modified_base 93: mod_base = OTHER; note = 2'-O-methyl modified nucleotide
  modified_base 94: mod_base = OTHER; note = 2'-O-methyl modified nucleotide
  modified_base 95: mod_base = OTHER; note = 2'-O-methyl modified nucleotide
  modified_base 96: mod_base = OTHER; note = 2'-O-methyl modified nucleotide
  modified_base 125: mod_base = OTHER; note = Nucleotide with phosphorothioate linkage
  modified_base 126: mod_base = OTHER; note = 2'-O-methyl modified nucleotide with phosphorothioate linkage
  modified_base 127: mod_base = OTHER; note = 2'-O-methyl modified nucleotide with phosphorothioate linkage
  modified_base 128: mod_base = OTHER; note = 2'-O-methyl modified nucleotide
gctggtacacggcagggtcagttttagagctagaaatagcaagttaaaataaggctagtccgttatcaacttgaaaaagtggcaccgagtcggtgcatccagaaccctagtgtgaccctgccgtgtac

SEQ ID NO: 16608 - RNA, 127 nt, synthetic construct
  source 1..127: mol_type = other RNA
  modified_base 1: mod_base = OTHER; note = 2'-O-methyl modified nucleotide with phosphorothioate linkage
  modified_base 2: mod_base = OTHER; note = 2'-O-methyl modified nucleotide with phosphorothioate linkage
  modified_base 3: mod_base = OTHER; note = 2'-O-methyl modified nucleotide with phosphorothioate linkage
  modified_base 29: mod_base = OTHER; note = 2'-O-methyl modified nucleotide
  modified_base 30: mod_base = OTHER; note = 2'-O-methyl modified nucleotide
  modified_base 31: mod_base = OTHER; note = 2'-O-methyl modified nucleotide
  modified_base 32: mod_base = OTHER; note = 2'-O-methyl modified nucleotide
  modified_base 33: mod_base = OTHER; note = 2'-O-methyl modified nucleotide
  modified_base 34: mod_base = OTHER; note = 2'-O-methyl modified nucleotide
  modified_base 35: mod_base = OTHER; note = 2'-O-methyl modified nucleotide
  modified_base 36: mod_base = OTHER; note = 2'-O-methyl modified nucleotide
  modified_base 37: mod_base = OTHER; note = 2'-O-methyl modified nucleotide
  modified_base 38: mod_base = OTHER; note = 2'-O-methyl modified nucleotide
  modified_base 39: mod_base = OTHER; note = 2'-O-methyl modified nucleotide
  modified_base 40: mod_base = OTHER; note = 2'-O-methyl modified nucleotide
  modified_base 69: mod_base = OTHER; note = 2'-O-methyl modified nucleotide
  modified_base 70: mod_base = OTHER; note = 2'-O-methyl modified nucleotide
  modified_base 71: mod_base = OTHER; note = 2'-O-methyl modified nucleotide
  modified_base 72: mod_base = OTHER; note = 2'-O-methyl modified nucleotide
  modified_base 73: mod_base = OTHER; note = 2'-O-methyl modified nucleotide
  modified_base 74: mod_base = OTHER; note = 2'-O-methyl modified nucleotide
  modified_base 75: mod_base = OTHER; note = 2'-O-methyl modified nucleotide
  modified_base 76: mod_base = OTHER; note = 2'-O-methyl modified nucleotide
  modified_base 77: mod_base = OTHER; note = 2'-O-methyl modified nucleotide
  modified_base 78: mod_base = OTHER; note = 2'-O-methyl modified nucleotide
  modified_base 79: mod_base = OTHER; note = 2'-O-methyl modified nucleotide
  modified_base 80: mod_base = OTHER; note = 2'-O-methyl modified nucleotide
  modified_base 81: mod_base = OTHER; note = 2'-O-methyl modified nucleotide
  modified_base 82: mod_base = OTHER; note = 2'-O-methyl modified nucleotide
  modified_base 83: mod_base = OTHER; note = 2'-O-methyl modified nucleotide
  modified_base 84: mod_base = OTHER; note = 2'-O-methyl modified nucleotide
  modified_base 85: mod_base = OTHER; note = 2'-O-methyl modified nucleotide
  modified_base 86: mod_base = OTHER; note = 2'-O-methyl modified nucleotide
  modified_base 87: mod_base = OTHER; note = 2'-O-methyl modified nucleotide
  modified_base 88: mod_base = OTHER; note = 2'-O-methyl modified nucleotide
  modified_base 89: mod_base = OTHER; note = 2'-O-methyl modified nucleotide
  modified_base 90: mod_base = OTHER; note = 2'-O-methyl modified nucleotide
  modified_base 91: mod_base = OTHER; note = 2'-O-methyl modified nucleotide
  modified_base 92: mod_base = OTHER; note = 2'-O-methyl modified nucleotide
  modified_base 93: mod_base = OTHER; note = 2'-O-methyl modified nucleotide
  modified_base 94: mod_base = OTHER; note = 2'-O-methyl modified nucleotide
  modified_base 95: mod_base = OTHER; note = 2'-O-methyl modified nucleotide
  modified_base 96: mod_base = OTHER; note = 2'-O-methyl modified nucleotide
  modified_base 124: mod_base = OTHER; note = Nucleotide with phosphorothioate linkage
  modified_base 125: mod_base = OTHER; note = 2'-O-methyl modified nucleotide with phosphorothioate linkage
  modified_base 126: mod_base = OTHER; note = 2'-O-methyl modified nucleotide with phosphorothioate linkage
  modified_base 127: mod_base = OTHER; note = 2'-O-methyl modified nucleotide
gctggtacacggcagggtcagttttagagctagaaatagcaagttaaaataaggctagtccgttatcaacttgaaaaagtggcaccgagtcggtgcatccagaaccctagtgtgaccctgccgtgta

SEQ ID NO: 16609 - RNA, 126 nt, synthetic construct
  source 1..126: mol_type = other RNA
  modified_base 1: mod_base = OTHER; note = 2'-O-methyl modified nucleotide with phosphorothioate linkage
  modified_base 2: mod_base = OTHER; note = 2'-O-methyl modified nucleotide with phosphorothioate linkage
  modified_base 3: mod_base = OTHER; note = 2'-O-methyl modified nucleotide with phosphorothioate linkage
  modified_base 29: mod_base = OTHER; note = 2'-O-methyl modified nucleotide
  modified_base 30: mod_base = OTHER; note = 2'-O-methyl modified nucleotide
  modified_base 31: mod_base = OTHER; note = 2'-O-methyl modified nucleotide
  modified_base 32: mod_base = OTHER; note = 2'-O-methyl modified nucleotide
  modified_base 33: mod_base = OTHER; note = 2'-O-methyl modified nucleotide
  modified_base 34: mod_base = OTHER; note = 2'-O-methyl modified nucleotide
  modified_base 35: mod_base = OTHER; note = 2'-O-methyl modified nucleotide
  modified_base 36: mod_base = OTHER; note = 2'-O-methyl modified nucleotide
  modified_base 37: mod_base = OTHER; note = 2'-O-methyl modified nucleotide
  modified_base 38: mod_base = OTHER; note = 2'-O-methyl modified nucleotide
  modified_base 39: mod_base = OTHER; note = 2'-O-methyl modified nucleotide
  modified_base 40: mod_base = OTHER; note = 2'-O-methyl modified nucleotide
  modified_base 69: mod_base = OTHER; note = 2'-O-methyl modified nucleotide
  modified_base 70: mod_base = OTHER; note = 2'-O-methyl modified nucleotide
  modified_base 71: mod_base = OTHER; note = 2'-O-methyl modified nucleotide
  modified_base 72: mod_base = OTHER; note = 2'-O-methyl modified nucleotide
  modified_base 73: mod_base = OTHER; note = 2'-O-methyl modified nucleotide
  modified_base 74: mod_base = OTHER; note = 2'-O-methyl modified nucleotide
  modified_base 75: mod_base = OTHER; note = 2'-O-methyl modified nucleotide
  modified_base 76: mod_base = OTHER; note = 2'-O-methyl modified nucleotide
  modified_base 77: mod_base = OTHER; note = 2'-O-methyl modified nucleotide
  modified_base 78: mod_base = OTHER; note = 2'-O-methyl modified nucleotide
  modified_base 79: mod_base = OTHER; note = 2'-O-methyl modified nucleotide
  modified_base 80: mod_base = OTHER; note = 2'-O-methyl modified nucleotide
  modified_base 81: mod_base = OTHER; note = 2'-O-methyl modified nucleotide
  modified_base 82: mod_base = OTHER; note = 2'-O-methyl modified nucleotide
  modified_base 83: mod_base = OTHER; note = 2'-O-methyl modified nucleotide
  modified_base 84: mod_base = OTHER; note = 2'-O-methyl modified nucleotide
  modified_base 85: mod_base = OTHER; note = 2'-O-methyl modified nucleotide
  modified_base 86: mod_base = OTHER; note = 2'-O-methyl modified nucleotide
  modified_base 87: mod_base = OTHER; note = 2'-O-methyl modified nucleotide
  modified_base 88: mod_base = OTHER; note = 2'-O-methyl modified nucleotide
  modified_base 89: mod_base = OTHER; note = 2'-O-methyl modified nucleotide
  modified_base 90: mod_base = OTHER; note = 2'-O-methyl modified nucleotide
  modified_base 91: mod_base = OTHER; note = 2'-O-methyl modified nucleotide
  modified_base 92: mod_base = OTHER; note = 2'-O-methyl modified nucleotide
  modified_base 93: mod_base = OTHER; note = 2'-O-methyl modified nucleotide
  modified_base 94: mod_base = OTHER; note = 2'-O-methyl modified nucleotide
  modified_base 95: mod_base = OTHER; note = 2'-O-methyl modified nucleotide
  modified_base 96: mod_base = OTHER; note = 2'-O-methyl modified nucleotide
  modified_base 123: mod_base = OTHER; note = Nucleotide with phosphorothioate linkage
  modified_base 124: mod_base = OTHER; note = 2'-O-methyl modified nucleotide with phosphorothioate linkage
  modified_base 125: mod_base = OTHER; note = 2'-O-methyl modified nucleotide with phosphorothioate linkage
  modified_base 126: mod_base = OTHER; note = 2'-O-methyl modified nucleotide
gctggtacacggcagggtcagttttagagctagaaatagcaagttaaaataaggctagtccgttatcaacttgaaaaagtggcaccgagtcggtgcatccagaaccctagtgtgaccctgccgtgt

SEQ ID NO: 16610 - RNA, 125 nt, synthetic construct
  source 1..125: mol_type = other RNA
  modified_base 1: mod_base = OTHER; note = 2'-O-methyl modified nucleotide with phosphorothioate linkage
  modified_base 2: mod_base = OTHER; note = 2'-O-methyl modified nucleotide with phosphorothioate linkage
  modified_base 3: mod_base = OTHER; note = 2'-O-methyl modified nucleotide with phosphorothioate linkage
  modified_base 29: mod_base = OTHER; note = 2'-O-methyl modified nucleotide
  modified_base 30: mod_base = OTHER; note = 2'-O-methyl modified nucleotide
  modified_base 31: mod_base = OTHER; note = 2'-O-methyl modified nucleotide
  modified_base 32: mod_base = OTHER; note = 2'-O-methyl modified nucleotide
  modified_base 33: mod_base = OTHER; note = 2'-O-methyl modified nucleotide
  modified_base 34: mod_base = OTHER; note = 2'-O-methyl modified nucleotide
  modified_base 35: mod_base = OTHER; note = 2'-O-methyl modified nucleotide
  modified_base 36: mod_base = OTHER; note = 2'-O-methyl modified nucleotide
  modified_base 37: mod_base = OTHER; note = 2'-O-methyl modified nucleotide
  modified_base 38: mod_base = OTHER; note = 2'-O-methyl modified nucleotide
  modified_base 39: mod_base = OTHER; note = 2'-O-methyl modified nucleotide
  modified_base 40: mod_base = OTHER; note = 2'-O-methyl modified nucleotide
  modified_base 69: mod_base = OTHER; note = 2'-O-methyl modified nucleotide
  modified_base 70: mod_base = OTHER; note = 2'-O-methyl modified nucleotide
  modified_base 71: mod_base = OTHER; note = 2'-O-methyl modified nucleotide
  modified_base 72: mod_base = OTHER; note = 2'-O-methyl modified nucleotide
  modified_base 73: mod_base = OTHER; note = 2'-O-methyl modified nucleotide
  modified_base 74: mod_base = OTHER; note = 2'-O-methyl modified nucleotide
  modified_base 75: mod_base = OTHER; note = 2'-O-methyl modified nucleotide
  modified_base 76: mod_base = OTHER; note = 2'-O-methyl modified nucleotide
  modified_base 77: mod_base = OTHER; note = 2'-O-methyl modified nucleotide
  modified_base 78: mod_base = OTHER; note = 2'-O-methyl modified nucleotide
  modified_base 79: mod_base = OTHER; note = 2'-O-methyl modified nucleotide
  modified_base 80: mod_base = OTHER; note = 2'-O-methyl modified nucleotide
  modified_base 81: mod_base = OTHER; note = 2'-O-methyl modified nucleotide
  modified_base 82: mod_base = OTHER; note = 2'-O-methyl modified nucleotide
  modified_base 83: mod_base = OTHER; note = 2'-O-methyl modified nucleotide
  modified_base 84: mod_base = OTHER; note = 2'-O-methyl modified nucleotide
  modified_base 85: mod_base = OTHER; note = 2'-O-methyl modified nucleotide
  modified_base 86: mod_base = OTHER; note = 2'-O-methyl modified nucleotide
  modified_base 87: mod_base = OTHER; note = 2'-O-methyl modified nucleotide
  modified_base 88: mod_base = OTHER; note = 2'-O-methyl modified nucleotide
  modified_base 89: mod_base = OTHER; note = 2'-O-methyl modified nucleotide
  modified_base 90: mod_base = OTHER; note = 2'-O-methyl modified nucleotide
  modified_base 91: mod_base = OTHER; note = 2'-O-methyl modified nucleotide
  modified_base 92: mod_base = OTHER; note = 2'-O-methyl modified nucleotide
  modified_base 93: mod_base = OTHER; note = 2'-O-methyl modified nucleotide
  modified_base 94: mod_base = OTHER; note = 2'-O-methyl modified nucleotide
  modified_base 95: mod_base = OTHER; note = 2'-O-methyl modified nucleotide
  modified_base 96: mod_base = OTHER; note = 2'-O-methyl modified nucleotide
  modified_base 122: mod_base = OTHER; note = Nucleotide with phosphorothioate linkage
  modified_base 123: mod_base = OTHER; note = 2'-O-methyl modified nucleotide with phosphorothioate linkage
  modified_base 124: mod_base = OTHER; note = 2'-O-methyl modified nucleotide with phosphorothioate linkage
  modified_base 125: mod_base = OTHER; note = 2'-O-methyl modified nucleotide
gctggtacacggcagggtcagttttagagctagaaatagcaagttaaaataaggctagtccgttatcaacttgaaaaagtggcaccgagtcggtgcatccagaaccctagtgtgaccctgccgtg

SEQ ID NO: 16611 - RNA, 124 nt, synthetic construct
  source 1..124: mol_type = other RNA
  modified_base 1: mod_base = OTHER; note = 2'-O-methyl modified nucleotide with phosphorothioate linkage
  modified_base 2: mod_base = OTHER; note = 2'-O-methyl modified nucleotide with phosphorothioate linkage
  modified_base 3: mod_base = OTHER; note = 2'-O-methyl modified nucleotide with phosphorothioate linkage
  modified_base 29: mod_base = OTHER; note = 2'-O-methyl modified nucleotide
  modified_base 30: mod_base = OTHER; note = 2'-O-methyl modified nucleotide
  modified_base 31: mod_base = OTHER; note = 2'-O-methyl modified nucleotide
  modified_base 32: mod_base = OTHER; note = 2'-O-methyl modified nucleotide
  modified_base 33: mod_base = OTHER; note = 2'-O-methyl modified nucleotide
  modified_base 34: mod_base = OTHER; note = 2'-O-methyl modified nucleotide
  modified_base 35: mod_base = OTHER; note = 2'-O-methyl modified nucleotide
  modified_base 36: mod_base = OTHER; note = 2'-O-methyl modified nucleotide
  modified_base 37: mod_base = OTHER; note = 2'-O-methyl modified nucleotide
  modified_base 38: mod_base = OTHER; note = 2'-O-methyl modified nucleotide
  modified_base 39: mod_base = OTHER; note = 2'-O-methyl modified nucleotide
  modified_base 40: mod_base = OTHER; note = 2'-O-methyl modified nucleotide
  modified_base 69: mod_base = OTHER; note = 2'-O-methyl modified nucleotide
  modified_base 70: mod_base = OTHER; note = 2'-O-methyl modified nucleotide
  modified_base 71: mod_base = OTHER; note = 2'-O-methyl modified nucleotide
  modified_base 72: mod_base = OTHER; note = 2'-O-methyl modified nucleotide
  modified_base 73: mod_base = OTHER; note = 2'-O-methyl modified nucleotide
  modified_base 74: mod_base = OTHER; note = 2'-O-methyl modified nucleotide
  modified_base 75: mod_base = OTHER; note = 2'-O-methyl modified nucleotide
  modified_base 76: mod_base = OTHER; note = 2'-O-methyl modified nucleotide
  modified_base 77: mod_base = OTHER; note = 2'-O-methyl modified nucleotide
  modified_base 78: mod_base = OTHER; note = 2'-O-methyl modified nucleotide
  modified_base 79: mod_base = OTHER; note = 2'-O-methyl modified nucleotide
  modified_base 80: mod_base = OTHER; note = 2'-O-methyl modified nucleotide
  modified_base 81: mod_base = OTHER; note = 2'-O-methyl modified nucleotide
  modified_base 82: mod_base = OTHER; note = 2'-O-methyl modified nucleotide
  modified_base 83: mod_base = OTHER; note = 2'-O-methyl modified nucleotide
  modified_base 84: mod_base = OTHER; note = 2'-O-methyl modified nucleotide
  modified_base 85: mod_base = OTHER; note = 2'-O-methyl modified nucleotide
  modified_base 86: mod_base = OTHER; note = 2'-O-methyl modified nucleotide
  modified_base 87: mod_base = OTHER; note = 2'-O-methyl modified nucleotide
  modified_base 88: mod_base = OTHER; note = 2'-O-methyl modified nucleotide
  modified_base 89: mod_base = OTHER; note = 2'-O-methyl modified nucleotide
  modified_base 90: mod_base = OTHER; note = 2'-O-methyl modified nucleotide
  modified_base 91: mod_base = OTHER; note = 2'-O-methyl modified nucleotide
  modified_base 92: mod_base = OTHER; note = 2'-O-methyl modified nucleotide
  modified_base 93: mod_base = OTHER; note = 2'-O-methyl modified nucleotide
  modified_base 94: mod_base = OTHER; note = 2'-O-methyl modified nucleotide
  modified_base 95: mod_base = OTHER; note = 2'-O-methyl modified nucleotide
  modified_base 96: mod_base = OTHER; note = 2'-O-methyl modified nucleotide
  modified_base 121: mod_base = OTHER; note = Nucleotide with phosphorothioate linkage
  modified_base 122: mod_base = OTHER; note = 2'-O-methyl modified nucleotide with phosphorothioate linkage
  modified_base 123: mod_base = OTHER; note = 2'-O-methyl modified nucleotide with phosphorothioate linkage
  modified_base 124: mod_base = OTHER; note = 2'-O-methyl modified nucleotide
gctggtacacggcagggtcagttttagagctagaaatagcaagttaaaataaggctagtccgttatcaacttgaaaaagtggcaccgagtcggtgcatccagaaccctagtgtgaccctgccgt

SEQ ID NO: 16612 - RNA, 123 nt, synthetic construct
  source 1..123: mol_type = other RNA
  modified_base 1: mod_base = OTHER; note = 2'-O-methyl modified nucleotide with phosphorothioate linkage
  modified_base 2: mod_base = OTHER; note = 2'-O-methyl modified nucleotide with phosphorothioate linkage
  modified_base 3: mod_base = OTHER; note = 2'-O-methyl modified nucleotide with phosphorothioate linkage
  modified_base 29: mod_base = OTHER; note = 2'-O-methyl modified nucleotide
  modified_base 30: mod_base = OTHER; note = 2'-O-methyl modified nucleotide
  modified_base 31: mod_base = OTHER; note = 2'-O-methyl modified nucleotide
  modified_base 32: mod_base = OTHER; note = 2'-O-methyl modified nucleotide
  modified_base 33: mod_base = OTHER; note = 2'-O-methyl modified nucleotide
  modified_base 34: mod_base = OTHER; note = 2'-O-methyl modified nucleotide
  modified_base 35: mod_base = OTHER; note = 2'-O-methyl modified nucleotide
  modified_base 36: mod_base = OTHER; note = 2'-O-methyl modified nucleotide
  modified_base 37: mod_base = OTHER; note = 2'-O-methyl modified nucleotide
  modified_base 38: mod_base = OTHER; note = 2'-O-methyl modified nucleotide
  modified_base 39: mod_base = OTHER; note = 2'-O-methyl modified nucleotide
  modified_base 40: mod_base = OTHER; note = 2'-O-methyl modified nucleotide
  modified_base 69: mod_base = OTHER; note = 2'-O-methyl modified nucleotide
  modified_base 70: mod_base = OTHER; note = 2'-O-methyl modified nucleotide
  modified_base 71: mod_base = OTHER; note = 2'-O-methyl modified nucleotide
  modified_base 72: mod_base = OTHER; note = 2'-O-methyl modified nucleotide
  modified_base 73: mod_base = OTHER; note = 2'-O-methyl modified nucleotide
  modified_base 74: mod_base = OTHER; note = 2'-O-methyl modified nucleotide
  modified_base 75: mod_base = OTHER; note = 2'-O-methyl modified nucleotide
  modified_base 76: mod_base = OTHER; note = 2'-O-methyl modified nucleotide
  modified_base 77: mod_base = OTHER; note = 2'-O-methyl modified nucleotide
  modified_base 78: mod_base = OTHER; note = 2'-O-methyl modified nucleotide
  modified_base 79: mod_base = OTHER; note = 2'-O-methyl modified nucleotide
  modified_base 80: mod_base = OTHER; note = 2'-O-methyl modified nucleotide
  modified_base 81: mod_base = OTHER; note = 2'-O-methyl modified nucleotide
  modified_base 82: mod_base = OTHER; note = 2'-O-methyl modified nucleotide
  modified_base 83: mod_base = OTHER; note = 2'-O-methyl modified nucleotide
  modified_base 84: mod_base = OTHER; note = 2'-O-methyl modified nucleotide
  modified_base 85: mod_base = OTHER; note = 2'-O-methyl modified nucleotide
  modified_base 86: mod_base = OTHER; note = 2'-O-methyl modified nucleotide
  modified_base 87: mod_base = OTHER; note = 2'-O-methyl modified nucleotide
  modified_base 88: mod_base = OTHER; note = 2'-O-methyl modified nucleotide
  modified_base 89: mod_base = OTHER; note = 2'-O-methyl modified nucleotide
  modified_base 90: mod_base = OTHER; note = 2'-O-methyl modified nucleotide
  modified_base 91: mod_base = OTHER; note = 2'-O-methyl modified nucleotide
  modified_base 92: mod_base = OTHER; note = 2'-O-methyl modified nucleotide
  modified_base 93: mod_base = OTHER; note = 2'-O-methyl modified nucleotide
  modified_base 94: mod_base = OTHER; note = 2'-O-methyl modified nucleotide
  modified_base 95: mod_base = OTHER; note = 2'-O-methyl modified nucleotide
  modified_base 96: mod_base = OTHER; note = 2'-O-methyl modified nucleotide
  modified_base 120: mod_base = OTHER; note = Nucleotide with phosphorothioate linkage
  modified_base 121: mod_base = OTHER; note = 2'-O-methyl modified nucleotide with phosphorothioate linkage
  modified_base 122: mod_base = OTHER; note = 2'-O-methyl modified nucleotide with phosphorothioate linkage
  modified_base 123: mod_base = OTHER; note = 2'-O-methyl modified nucleotide
gctggtacacggcagggtcagttttagagctagaaatagcaagttaaaataaggctagtccgttatcaacttgaaaaagtggcaccgagtcggtgcatccagaaccctagtgtgaccctgccg

SEQ ID NO: 16613 - RNA, 130 nt, synthetic construct
  source 1..130: mol_type = other RNA
  modified_base 1: mod_base = OTHER; note = 2'-O-methyl modified nucleotide with phosphorothioate linkage
  modified_base 2: mod_base = OTHER; note = 2'-O-methyl modified nucleotide with phosphorothioate linkage
  modified_base 3: mod_base = OTHER; note = 2'-O-methyl modified nucleotide with phosphorothioate linkage
  modified_base 29: mod_base = OTHER; note = 2'-O-methyl modified nucleotide
  modified_base 30: mod_base = OTHER; note = 2'-O-methyl modified nucleotide
  modified_base 31: mod_base = OTHER; note = 2'-O-methyl modified nucleotide
  modified_base 32: mod_base = OTHER; note = 2'-O-methyl modified nucleotide
  modified_base 33: mod_base = OTHER; note = 2'-O-methyl modified nucleotide
  modified_base 34: mod_base = OTHER; note = 2'-O-methyl modified nucleotide
  modified_base 35: mod_base = OTHER; note = 2'-O-methyl modified nucleotide
  modified_base 36: mod_base = OTHER; note = 2'-O-methyl modified nucleotide
  modified_base 37: mod_base = OTHER; note = 2'-O-methyl modified nucleotide
  modified_base 38: mod_base = OTHER; note = 2'-O-methyl modified nucleotide
  modified_base 39: mod_base = OTHER; note = 2'-O-methyl modified nucleotide
  modified_base 40: mod_base = OTHER; note = 2'-O-methyl modified nucleotide
  modified_base 69: mod_base = OTHER; note = 2'-O-methyl modified nucleotide
  modified_base 70: mod_base = OTHER; note = 2'-O-methyl modified nucleotide
  modified_base 71: mod_base = OTHER; note = 2'-O-methyl modified nucleotide
  modified_base 72: mod_base = OTHER; note = 2'-O-methyl modified nucleotide
  modified_base 73: mod_base = OTHER; note = 2'-O-methyl modified nucleotide
  modified_base 74: mod_base = OTHER; note = 2'-O-methyl modified nucleotide
  modified_base 75: mod_base = OTHER; note = 2'-O-methyl modified nucleotide
  modified_base 76: mod_base = OTHER; note = 2'-O-methyl modified nucleotide
  modified_base 77: mod_base = OTHER; note = 2'-O-methyl modified nucleotide
  modified_base 78: mod_base = OTHER; note = 2'-O-methyl modified nucleotide
  modified_base 79: mod_base = OTHER; note = 2'-O-methyl modified nucleotide
  modified_base 80: mod_base = OTHER; note = 2'-O-methyl modified nucleotide
  modified_base 81: mod_base = OTHER; note = 2'-O-methyl modified nucleotide
  modified_base 82: mod_base = OTHER; note = 2'-O-methyl modified nucleotide
  modified_base 83: mod_base = OTHER; note = 2'-O-methyl modified nucleotide
  modified_base 84: mod_base = OTHER; note = 2'-O-methyl modified nucleotide
  modified_base 85: mod_base = OTHER; note = 2'-O-methyl modified nucleotide
  modified_base 86: mod_base = OTHER; note = 2'-O-methyl modified nucleotide
  modified_base 87: mod_base = OTHER; note = 2'-O-methyl modified nucleotide
  modified_base 88: mod_base = OTHER; note = 2'-O-methyl modified nucleotide
  modified_base 89: mod_base = OTHER; note = 2'-O-methyl modified nucleotide
  modified_base 90: mod_base = OTHER; note = 2'-O-methyl modified nucleotide
  modified_base 91: mod_base = OTHER; note = 2'-O-methyl modified nucleotide
  modified_base 92: mod_base = OTHER; note = 2'-O-methyl modified nucleotide
  modified_base 93: mod_base = OTHER; note = 2'-O-methyl modified nucleotide
  modified_base 94: mod_base = OTHER; note = 2'-O-methyl modified nucleotide
  modified_base 95: mod_base = OTHER; note = 2'-O-methyl modified nucleotide
  modified_base 96: mod_base = OTHER; note = 2'-O-methyl modified nucleotide
  modified_base 127: mod_base = OTHER; note = Nucleotide with phosphorothioate linkage
  modified_base 128: mod_base = OTHER; note = 2'-O-methyl modified nucleotide with phosphorothioate linkage
  modified_base 129: mod_base = OTHER; note = 2'-O-methyl modified nucleotide with phosphorothioate linkage
  modified_base 130: mod_base = OTHER; note = 2'-O-methyl modified nucleotide
gctggtacacggcagggtcagttttagagctagaaatagcaagttaaaataaggctagtccgttatcaacttgaaaaagtggcaccgagtcggtgcatatccagaaccctagtgtgaccctgccgtgtac

SEQ ID NO: 16614 - RNA, 129 nt, synthetic construct
  source 1..129: mol_type = other RNA
  modified_base 1: mod_base = OTHER; note = 2'-O-methyl modified nucleotide with phosphorothioate linkage
  modified_base 2: mod_base = OTHER; note = 2'-O-methyl modified nucleotide with phosphorothioate linkage
  modified_base 3: mod_base = OTHER; note = 2'-O-methyl modified nucleotide with phosphorothioate linkage
  modified_base 29: mod_base = OTHER; note = 2'-O-methyl modified nucleotide
  modified_base 30: mod_base = OTHER; note = 2'-O-methyl modified nucleotide
  modified_base 31: mod_base = OTHER; note = 2'-O-methyl modified nucleotide
  modified_base 32: mod_base = OTHER; note = 2'-O-methyl modified nucleotide
  modified_base 33: mod_base = OTHER; note = 2'-O-methyl modified nucleotide
  modified_base 34: mod_base = OTHER; note = 2'-O-methyl modified nucleotide
  modified_base 35: mod_base = OTHER; note = 2'-O-methyl modified nucleotide
  modified_base 36: mod_base = OTHER; note = 2'-O-methyl modified nucleotide
  modified_base 37: mod_base = OTHER; note = 2'-O-methyl modified nucleotide
  modified_base 38: mod_base = OTHER; note = 2'-O-methyl modified nucleotide
  modified_base 39: mod_base = OTHER; note = 2'-O-methyl modified nucleotide
  modified_base 40: mod_base = OTHER; note = 2'-O-methyl modified nucleotide
  modified_base 69: mod_base = OTHER; note = 2'-O-methyl modified nucleotide
  modified_base 70: mod_base = OTHER; note = 2'-O-methyl modified nucleotide
  modified_base 71: mod_base = OTHER; note = 2'-O-methyl modified nucleotide
  modified_base 72: mod_base = OTHER; note = 2'-O-methyl modified nucleotide
  modified_base 73: mod_base = OTHER; note = 2'-O-methyl modified nucleotide
  modified_base 74: mod_base = OTHER; note = 2'-O-methyl modified nucleotide
  modified_base 75: mod_base = OTHER; note = 2'-O-methyl modified nucleotide
  modified_base 76: mod_base = OTHER; note = 2'-O-methyl modified nucleotide
  modified_base 77: mod_base = OTHER; note = 2'-O-methyl modified nucleotide
  modified_base 78: mod_base = OTHER; note = 2'-O-methyl modified nucleotide
  modified_base 79: mod_base = OTHER; note = 2'-O-methyl modified nucleotide
  modified_base 80: mod_base = OTHER; note = 2'-O-methyl modified nucleotide
  modified_base 81: mod_base = OTHER; note = 2'-O-methyl modified nucleotide
  modified_base 82: mod_base = OTHER; note = 2'-O-methyl modified nucleotide
  modified_base 83: mod_base = OTHER; note = 2'-O-methyl modified nucleotide
  modified_base 84: mod_base = OTHER; note = 2'-O-methyl modified nucleotide
  modified_base 85: mod_base = OTHER; note = 2'-O-methyl modified nucleotide
  modified_base 86: mod_base = OTHER; note = 2'-O-methyl modified nucleotide
  modified_base 87: mod_base = OTHER; note = 2'-O-methyl modified nucleotide
  modified_base 88: mod_base = OTHER; note = 2'-O-methyl modified nucleotide
  modified_base 89: mod_base = OTHER; note = 2'-O-methyl modified nucleotide
  modified_base 90: mod_base = OTHER; note = 2'-O-methyl modified nucleotide
  modified_base 91: mod_base = OTHER; note = 2'-O-methyl modified nucleotide
  modified_base 92: mod_base = OTHER; note = 2'-O-methyl modified nucleotide
  modified_base 93: mod_base = OTHER; note = 2'-O-methyl modified nucleotide
  modified_base 94: mod_base = OTHER; note = 2'-O-methyl modified nucleotide
  modified_base 95: mod_base = OTHER; note = 2'-O-methyl modified nucleotide
  modified_base 96: mod_base = OTHER; note = 2'-O-methyl modified nucleotide
  modified_base 126: mod_base = OTHER; note = Nucleotide with phosphorothioate linkage
  modified_base 127: mod_base = OTHER; note = 2'-O-methyl modified nucleotide with phosphorothioate linkage
  modified_base 128: mod_base = OTHER; note = 2'-O-methyl modified nucleotide with phosphorothioate linkage
  modified_base 129: mod_base = OTHER; note = 2'-O-methyl modified nucleotide
gctggtacacggcagggtcagttttagagctagaaatagcaagttaaaataaggctagtccgttatcaacttgaaaaagtggcaccgagtcggtgcatatccagaaccctagtgtgaccctgccgtgta

SEQ ID NO: 16615 - RNA, 128 nt, synthetic construct
  source 1..128: mol_type = other RNA
  modified_base 1: mod_base = OTHER; note = 2'-O-methyl modified nucleotide with phosphorothioate linkage
  modified_base 2: mod_base = OTHER; note = 2'-O-methyl modified nucleotide with phosphorothioate linkage
  modified_base 3: mod_base = OTHER; note = 2'-O-methyl modified nucleotide with phosphorothioate linkage
  modified_base 29: mod_base = OTHER; note = 2'-O-methyl modified nucleotide
  modified_base 30: mod_base = OTHER; note = 2'-O-methyl modified nucleotide
  modified_base 31: mod_base = OTHER; note = 2'-O-methyl modified nucleotide
  modified_base 32: mod_base = OTHER; note = 2'-O-methyl modified nucleotide
  modified_base 33: mod_base = OTHER; note = 2'-O-methyl modified nucleotide
  modified_base 34: mod_base = OTHER; note = 2'-O-methyl modified nucleotide
  modified_base 35: mod_base = OTHER; note = 2'-O-methyl modified nucleotide
  modified_base 36: mod_base = OTHER; note = 2'-O-methyl modified nucleotide
  modified_base 37: mod_base = OTHER; note = 2'-O-methyl modified nucleotide
  modified_base 38: mod_base = OTHER; note = 2'-O-methyl modified nucleotide
  modified_base 39: mod_base = OTHER; note = 2'-O-methyl modified nucleotide
  modified_base 40: mod_base = OTHER; note = 2'-O-methyl modified nucleotide
  modified_base 69: mod_base = OTHER; note = 2'-O-methyl modified nucleotide
  modified_base 70: mod_base = OTHER; note = 2'-O-methyl modified nucleotide
  modified_base 71: mod_base = OTHER; note = 2'-O-methyl modified nucleotide
  modified_base 72: mod_base = OTHER; note = 2'-O-methyl modified nucleotide
  modified_base 73: mod_base = OTHER; note = 2'-O-methyl modified nucleotide
  modified_base 74: mod_base = OTHER; note = 2'-O-methyl modified nucleotide
  modified_base 75: mod_base = OTHER; note = 2'-O-methyl modified nucleotide
  modified_base 76: mod_base = OTHER; note = 2'-O-methyl modified nucleotide
  modified_base 77: mod_base = OTHER; note = 2'-O-methyl modified nucleotide
  modified_base 78: mod_base = OTHER; note = 2'-O-methyl modified nucleotide
  modified_base 79: mod_base = OTHER; note = 2'-O-methyl modified nucleotide
  modified_base 80: mod_base = OTHER; note = 2'-O-methyl modified nucleotide
  modified_base 81: mod_base = OTHER; note = 2'-O-methyl modified nucleotide
  modified_base 82: mod_base = OTHER; note = 2'-O-methyl modified nucleotide
  modified_base 83: mod_base = OTHER; note = 2'-O-methyl modified nucleotide
  modified_base 84: mod_base = OTHER; note = 2'-O-methyl modified nucleotide
  modified_base 85: mod_base = OTHER; note = 2'-O-methyl modified nucleotide
  modified_base 86: mod_base = OTHER; note = 2'-O-methyl modified nucleotide
  modified_base 87: mod_base = OTHER; note = 2'-O-methyl modified nucleotide
  modified_base 88: mod_base = OTHER; note = 2'-O-methyl modified nucleotide
  modified_base 89: mod_base = OTHER; note = 2'-O-methyl modified nucleotide
  modified_base 90: mod_base = OTHER; note = 2'-O-methyl modified nucleotide
  modified_base 91: mod_base = OTHER; note = 2'-O-methyl modified nucleotide
  modified_base 92: mod_base = OTHER; note = 2'-O-methyl modified nucleotide
  modified_base 93: mod_base = OTHER; note = 2'-O-methyl modified nucleotide
  modified_base 94: mod_base = OTHER; note = 2'-O-methyl modified nucleotide
  modified_base 95: mod_base = OTHER; note = 2'-O-methyl modified nucleotide
  modified_base 96: mod_base = OTHER; note = 2'-O-methyl modified nucleotide
  modified_base 125: mod_base = OTHER; note = Nucleotide with phosphorothioate linkage
  modified_base 126: mod_base = OTHER; note = 2'-O-methyl modified nucleotide with phosphorothioate linkage
  modified_base 127: mod_base = OTHER; note = 2'-O-methyl modified nucleotide with phosphorothioate linkage
  modified_base 128: mod_base = OTHER; note = 2'-O-methyl modified nucleotide
gctggtacacggcagggtcagttttagagctagaaatagcaagttaaaataaggctagtccgttatcaacttgaaaaagtggcaccgagtcggtgcatatccagaaccctagtgtgaccctgccgtgt

SEQ ID NO: 16616 - RNA, 127 nt, synthetic construct
  source 1..127: mol_type = other RNA
  modified_base 1: mod_base = OTHER; note = 2'-O-methyl modified nucleotide with phosphorothioate linkage
  modified_base 2: mod_base = OTHER; note = 2'-O-methyl modified nucleotide with phosphorothioate linkage
  modified_base 3: mod_base = OTHER; note = 2'-O-methyl modified nucleotide with phosphorothioate linkage
  modified_base 29: mod_base = OTHER; note = 2'-O-methyl modified nucleotide
  modified_base 30: mod_base = OTHER; note = 2'-O-methyl modified nucleotide
  modified_base 31: mod_base = OTHER; note = 2'-O-methyl modified nucleotide
  modified_base 32: mod_base = OTHER; note = 2'-O-methyl modified nucleotide
  modified_base 33: mod_base = OTHER; note = 2'-O-methyl modified nucleotide
  modified_base 34: mod_base = OTHER; note = 2'-O-methyl modified nucleotide
  modified_base 35: mod_base = OTHER; note = 2'-O-methyl modified nucleotide
  modified_base 36: mod_base = OTHER; note = 2'-O-methyl modified nucleotide
  modified_base 37: mod_base = OTHER; note = 2'-O-methyl modified nucleotide
  modified_base 38: mod_base = OTHER; note = 2'-O-methyl modified nucleotide
  modified_base 39: mod_base = OTHER; note = 2'-O-methyl modified nucleotide
  modified_base 40: mod_base = OTHER; note = 2'-O-methyl modified nucleotide
  modified_base 69: mod_base = OTHER; note = 2'-O-methyl modified nucleotide
  modified_base 70: mod_base = OTHER; note = 2'-O-methyl modified nucleotide
  modified_base 71: mod_base = OTHER; note = 2'-O-methyl modified nucleotide
  modified_base 72: mod_base = OTHER; note = 2'-O-methyl modified nucleotide
  modified_base 73: mod_base = OTHER; note = 2'-O-methyl modified nucleotide
  modified_base 74: mod_base = OTHER; note = 2'-O-methyl modified nucleotide
  modified_base 75: mod_base = OTHER; note = 2'-O-methyl modified nucleotide
  modified_base 76: mod_base = OTHER; note = 2'-O-methyl modified nucleotide
  modified_base 77: mod_base = OTHER; note = 2'-O-methyl modified nucleotide
  modified_base 78: mod_base = OTHER; note = 2'-O-methyl modified nucleotide
  modified_base 79: mod_base = OTHER; note = 2'-O-methyl modified nucleotide
  modified_base 80: mod_base = OTHER; note = 2'-O-methyl modified nucleotide
  modified_base 81: mod_base = OTHER; note = 2'-O-methyl modified nucleotide
  modified_base 82: mod_base = OTHER; note = 2'-O-methyl modified nucleotide
  modified_base 83: mod_base = OTHER; note = 2'-O-methyl modified nucleotide
  modified_base 84: mod_base = OTHER; note = 2'-O-methyl modified nucleotide
  modified_base 85: mod_base = OTHER; note = 2'-O-methyl modified nucleotide
  modified_base 86: mod_base = OTHER; note = 2'-O-methyl modified nucleotide
  modified_base 87: mod_base = OTHER; note = 2'-O-methyl modified nucleotide
  modified_base 88: mod_base = OTHER; note = 2'-O-methyl modified nucleotide
  modified_base 89: mod_base = OTHER; note = 2'-O-methyl modified nucleotide
  modified_base 90: mod_base = OTHER; note = 2'-O-methyl modified nucleotide
  modified_base 91: mod_base = OTHER; note = 2'-O-methyl modified nucleotide
  modified_base 92: mod_base = OTHER; note = 2'-O-methyl modified nucleotide
  modified_base 93: mod_base = OTHER; note = 2'-O-methyl modified nucleotide
  modified_base 94: mod_base = OTHER; note = 2'-O-methyl modified nucleotide
  modified_base 95: mod_base = OTHER; note = 2'-O-methyl modified nucleotide
  modified_base 96: mod_base = OTHER; note = 2'-O-methyl modified nucleotide
  modified_base 124: mod_base = OTHER; note = Nucleotide with phosphorothioate linkage
  modified_base 125: mod_base = OTHER; note = 2'-O-methyl modified nucleotide with phosphorothioate linkage
  modified_base 126: mod_base = OTHER; note = 2'-O-methyl modified nucleotide with phosphorothioate linkage
  modified_base 127: mod_base = OTHER; note = 2'-O-methyl modified nucleotide
gctggtacacggcagggtcagttttagagctagaaatagcaagttaaaataaggctagtccgttatcaacttgaaaaagtggcaccgagtcggtgcatatccagaaccctagtgtgaccctgccgtg

SEQ ID NO: 16617 - RNA, 126 nt, synthetic construct
  source 1..126: mol_type = other RNA
  modified_base 1: mod_base = OTHER; note = 2'-O-methyl modified nucleotide with phosphorothioate linkage
  modified_base 2: mod_base = OTHER; note = 2'-O-methyl modified nucleotide with phosphorothioate linkage
  modified_base 3: mod_base = OTHER; note = 2'-O-methyl modified nucleotide with phosphorothioate linkage
  modified_base 29: mod_base = OTHER; note = 2'-O-methyl modified nucleotide
  modified_base 30: mod_base = OTHER; note = 2'-O-methyl modified nucleotide
  modified_base 31: mod_base = OTHER; note = 2'-O-methyl modified nucleotide
  modified_base 32: mod_base = OTHER; note = 2'-O-methyl modified nucleotide
  modified_base 33: mod_base = OTHER; note = 2'-O-methyl modified nucleotide
  modified_base 34: mod_base = OTHER; note = 2'-O-methyl modified nucleotide
  modified_base 35: mod_base = OTHER; note = 2'-O-methyl modified nucleotide
  modified_base 36: mod_base = OTHER; note = 2'-O-methyl modified nucleotide
  modified_base 37: mod_base = OTHER; note = 2'-O-methyl modified nucleotide
  modified_base 38: mod_base = OTHER; note = 2'-O-methyl modified nucleotide
  modified_base 39: mod_base = OTHER; note = 2'-O-methyl modified nucleotide
  modified_base 40: mod_base = OTHER; note = 2'-O-methyl modified nucleotide
  modified_base 69: mod_base = OTHER; note = 2'-O-methyl modified nucleotide
  modified_base 70: mod_base = OTHER; note = 2'-O-methyl modified nucleotide
  modified_base 71: mod_base = OTHER; note = 2'-O-methyl modified nucleotide
  modified_base 72: mod_base = OTHER; note = 2'-O-methyl modified nucleotide
  modified_base 73: mod_base = OTHER; note = 2'-O-methyl modified nucleotide
  modified_base 74: mod_base = OTHER; note = 2'-O-methyl modified nucleotide
  modified_base 75: mod_base = OTHER; note = 2'-O-methyl modified nucleotide
  modified_base 76: mod_base = OTHER; note = 2'-O-methyl modified nucleotide
  modified_base 77: mod_base = OTHER; note = 2'-O-methyl modified nucleotide
  modified_base 78: mod_base = OTHER; note = 2'-O-methyl modified nucleotide
  modified_base 79: mod_base = OTHER; note = 2'-O-methyl modified nucleotide
  modified_base 80: mod_base = OTHER; note = 2'-O-methyl modified nucleotide
  modified_base 81: mod_base = OTHER; note = 2'-O-methyl modified nucleotide
  modified_base 82: mod_base = OTHER; note = 2'-O-methyl modified nucleotide
  modified_base 83: mod_base = OTHER; note = 2'-O-methyl modified nucleotide
  modified_base 84: mod_base = OTHER; note = 2'-O-methyl modified nucleotide
  modified_base 85: mod_base = OTHER; note = 2'-O-methyl modified nucleotide
  modified_base 86: mod_base = OTHER; note = 2'-O-methyl modified nucleotide
  modified_base 87: mod_base = OTHER; note = 2'-O-methyl modified nucleotide
  modified_base 88: mod_base = OTHER; note = 2'-O-methyl modified nucleotide
  modified_base 89: mod_base = OTHER; note = 2'-O-methyl modified nucleotide
  modified_base 90: mod_base = OTHER; note = 2'-O-methyl modified nucleotide
  modified_base 91: mod_base = OTHER; note = 2'-O-methyl modified nucleotide
  modified_base 92: mod_base = OTHER; note = 2'-O-methyl modified nucleotide
  modified_base 93: mod_base = OTHER; note = 2'-O-methyl modified nucleotide
  modified_base 94: mod_base = OTHER; note = 2'-O-methyl modified nucleotide
  modified_base 95: mod_base = OTHER; note = 2'-O-methyl modified nucleotide
  modified_base 96: mod_base = OTHER; note = 2'-O-methyl modified nucleotide
  modified_base 123: mod_base = OTHER; note = Nucleotide with phosphorothioate linkage
  modified_base 124: mod_base = OTHER; note = 2'-O-methyl modified nucleotide with phosphorothioate linkage
  modified_base 125: mod_base = OTHER; note = 2'-O-methyl modified nucleotide with phosphorothioate linkage
  modified_base 126: mod_base = OTHER; note = 2'-O-methyl modified nucleotide
gctggtacacggcagggtcagttttagagctagaaatagcaagttaaaataaggctagtccgttatcaacttgaaaaagtggcaccgagtcggtgcatatccagaaccctagtgtgaccctgccgt

SEQ ID NO: 16618 - RNA, 125 nt, synthetic construct
  source 1..125: mol_type = other RNA
  modified_base 1: mod_base = OTHER; note = 2'-O-methyl modified nucleotide with phosphorothioate linkage
  modified_base 2: mod_base = OTHER; note = 2'-O-methyl modified nucleotide with phosphorothioate linkage
  modified_base 3: mod_base = OTHER; note = 2'-O-methyl modified nucleotide with phosphorothioate linkage
  modified_base 29: mod_base = OTHER; note = 2'-O-methyl modified nucleotide
  modified_base 30: mod_base = OTHER; note = 2'-O-methyl modified nucleotide
  modified_base 31: mod_base = OTHER; note = 2'-O-methyl modified nucleotide
  modified_base 32: mod_base = OTHER; note = 2'-O-methyl modified nucleotide
  modified_base 33: mod_base = OTHER; note = 2'-O-methyl modified nucleotide
  modified_base 34: mod_base = OTHER; note = 2'-O-methyl modified nucleotide
  modified_base 35: mod_base = OTHER; note = 2'-O-methyl modified nucleotide
  modified_base 36: mod_base = OTHER; note = 2'-O-methyl modified nucleotide
  modified_base 37: mod_base = OTHER; note = 2'-O-methyl modified nucleotide
  modified_base 38: mod_base = OTHER; note = 2'-O-methyl modified nucleotide
  modified_base 39: mod_base = OTHER; note = 2'-O-methyl modified nucleotide
  modified_base 40: mod_base = OTHER; note = 2'-O-methyl modified nucleotide
  modified_base 69: mod_base = OTHER; note = 2'-O-methyl modified nucleotide
  modified_base 70: mod_base = OTHER; note = 2'-O-methyl modified nucleotide
  modified_base 71: mod_base = OTHER; note = 2'-O-methyl modified nucleotide
  modified_base 72: mod_base = OTHER; note = 2'-O-methyl modified nucleotide
  modified_base 73: mod_base = OTHER; note = 2'-O-methyl modified nucleotide
  modified_base 74: mod_base = OTHER; note = 2'-O-methyl modified nucleotide
  modified_base 75: mod_base = OTHER; note = 2'-O-methyl modified nucleotide
  modified_base 76: mod_base = OTHER; note = 2'-O-methyl modified nucleotide
  modified_base 77: mod_base = OTHER; note = 2'-O-methyl modified nucleotide
  modified_base 78: mod_base = OTHER; note = 2'-O-methyl modified nucleotide
  modified_base 79: mod_base = OTHER; note = 2'-O-methyl modified nucleotide
  modified_base 80: mod_base = OTHER; note = 2'-O-methyl modified nucleotide
  modified_base 81: mod_base = OTHER; note = 2'-O-methyl modified nucleotide
  modified_base 82: mod_base = OTHER; note = 2'-O-methyl modified nucleotide
  modified_base 83: mod_base = OTHER; note = 2'-O-methyl modified nucleotide
  modified_base 84: mod_base = OTHER; note = 2'-O-methyl modified nucleotide
  modified_base 85: mod_base = OTHER; note = 2'-O-methyl modified nucleotide
  modified_base 86: mod_base = OTHER; note = 2'-O-methyl modified nucleotide
  modified_base 87: mod_base = OTHER; note = 2'-O-methyl modified nucleotide
  modified_base 88: mod_base = OTHER; note = 2'-O-methyl modified nucleotide
  modified_base 89: mod_base = OTHER; note = 2'-O-methyl modified nucleotide
  modified_base 90: mod_base = OTHER; note = 2'-O-methyl modified nucleotide
  modified_base 91: mod_base = OTHER; note = 2'-O-methyl modified nucleotide
  modified_base 92: mod_base = OTHER; note = 2'-O-methyl modified nucleotide
  modified_base 93: mod_base = OTHER; note = 2'-O-methyl modified nucleotide
  modified_base 94: mod_base = OTHER; note = 2'-O-methyl modified nucleotide
  modified_base 95: mod_base = OTHER; note = 2'-O-methyl modified nucleotide
  modified_base 96: mod_base = OTHER; note = 2'-O-methyl modified nucleotide
  modified_base 122: mod_base = OTHER; note = Nucleotide with phosphorothioate linkage
  modified_base 123: mod_base = OTHER; note = 2'-O-methyl modified nucleotide with phosphorothioate linkage
  modified_base 124: mod_base = OTHER; note = 2'-O-methyl modified nucleotide with phosphorothioate linkage
  modified_base 125: mod_base = OTHER; note = 2'-O-methyl modified nucleotide
gctggtacacggcagggtcagttttagagctagaaatagcaagttaaaataaggctagtccgttatcaacttgaaaaagtggcaccgagtcggtgcatatccagaaccctagtgtgaccctgccg

SEQ ID NO: 16619 - RNA, 132 nt, synthetic construct
  source 1..132: mol_type = other RNA
  modified_base 1: mod_base = OTHER; note = 2'-O-methyl modified nucleotide with phosphorothioate linkage
  modified_base 2: mod_base = OTHER; note = 2'-O-methyl modified nucleotide with phosphorothioate linkage
  modified_base 3: mod_base = OTHER; note = 2'-O-methyl modified nucleotide with phosphorothioate linkage
  modified_base 29: mod_base = OTHER; note = 2'-O-methyl modified nucleotide
  modified_base 30: mod_base = OTHER; note = 2'-O-methyl modified nucleotide
  modified_base 31: mod_base = OTHER; note = 2'-O-methyl modified nucleotide
  modified_base 32: mod_base = OTHER; note = 2'-O-methyl modified nucleotide
  modified_base 33: mod_base = OTHER; note = 2'-O-methyl modified nucleotide
  modified_base 34: mod_base = OTHER; note = 2'-O-methyl modified nucleotide
  modified_base 35: mod_base = OTHER; note = 2'-O-methyl modified nucleotide
  modified_base 36: mod_base = OTHER; note = 2'-O-methyl modified nucleotide
  modified_base 37: mod_base = OTHER; note = 2'-O-methyl modified nucleotide
  modified_base 38: mod_base = OTHER; note = 2'-O-methyl modified nucleotide
  modified_base 39: mod_base = OTHER; note = 2'-O-methyl modified nucleotide
  modified_base 40: mod_base = OTHER; note = 2'-O-methyl modified nucleotide
  modified_base 69: mod_base = OTHER; note = 2'-O-methyl modified nucleotide
  modified_base 70: mod_base = OTHER; note = 2'-O-methyl modified nucleotide
  modified_base 71: mod_base = OTHER; note = 2'-O-methyl modified nucleotide
  modified_base 72: mod_base = OTHER; note = 2'-O-methyl modified nucleotide
  modified_base 73: mod_base = OTHER; note = 2'-O-methyl modified nucleotide
  modified_base 74: mod_base = OTHER; note = 2'-O-methyl modified nucleotide
  modified_base 75: mod_base = OTHER; note = 2'-O-methyl modified nucleotide
  modified_base 76: mod_base = OTHER; note = 2'-O-methyl modified nucleotide
  modified_base 77: mod_base = OTHER; note = 2'-O-methyl modified nucleotide
  modified_base 78: mod_base = OTHER; note = 2'-O-methyl modified nucleotide
  modified_base 79: mod_base = OTHER; note = 2'-O-methyl modified nucleotide
  modified_base 80: mod_base = OTHER; note = 2'-O-methyl modified nucleotide
  modified_base 81: mod_base = OTHER; note = 2'-O-methyl modified nucleotide
  modified_base 82: mod_base = OTHER; note = 2'-O-methyl modified nucleotide
  modified_base 83: mod_base = OTHER; note = 2'-O-methyl modified nucleotide
  modified_base 84: mod_base = OTHER; note = 2'-O-methyl modified nucleotide
  modified_base 85: mod_base = OTHER; note = 2'-O-methyl modified nucleotide
  modified_base 86: mod_base = OTHER; note = 2'-O-methyl modified nucleotide
  modified_base 87: mod_base = OTHER; note = 2'-O-methyl modified nucleotide
  modified_base 88: mod_base = OTHER; note = 2'-O-methyl modified nucleotide
  modified_base 89: mod_base = OTHER; note = 2'-O-methyl modified nucleotide
  modified_base 90: mod_base = OTHER; note = 2'-O-methyl modified nucleotide
  modified_base 91: mod_base = OTHER; note = 2'-O-methyl modified nucleotide
  modified_base 92: mod_base = OTHER; note = 2'-O-methyl modified nucleotide
  modified_base 93: mod_base = OTHER; note = 2'-O-methyl modified nucleotide
  modified_base 94: mod_base = OTHER; note = 2'-O-methyl modified nucleotide
  modified_base 95: mod_base = OTHER; note = 2'-O-methyl modified nucleotide
  modified_base 96: mod_base = OTHER; note = 2'-O-methyl modified nucleotide
  modified_base 129: mod_base = OTHER; note = Nucleotide with phosphorothioate linkage
  modified_base 130: mod_base = OTHER; note = 2'-O-methyl modified nucleotide with phosphorothioate linkage
  modified_base 131: mod_base = OTHER; note = 2'-O-methyl modified nucleotide with phosphorothioate linkage
  modified_base 132: mod_base = OTHER; note = 2'-O-methyl modified nucleotide
gctggtacacggcagggtcagttttagagctagaaatagcaagttaaaataaggctagtccgttatcaacttgaaaaagtggcaccgagtcggtgcagatatccagaaccctagtgtgaccctgccgtgtac

SEQ ID NO: 16620 - RNA, 131 nt, synthetic construct
  source 1..131: mol_type = other RNA
  modified_base 1: mod_base = OTHER; note = 2'-O-methyl modified nucleotide with phosphorothioate linkage
  modified_base 2: mod_base = OTHER; note = 2'-O-methyl modified nucleotide with phosphorothioate linkage
  modified_base 3: mod_base = OTHER; note = 2'-O-methyl modified nucleotide with phosphorothioate linkage
  modified_base 29: mod_base = OTHER; note = 2'-O-methyl modified nucleotide
  modified_base 30: mod_base = OTHER; note = 2'-O-methyl modified nucleotide
  modified_base 31: mod_base = OTHER; note = 2'-O-methyl modified nucleotide
  modified_base 32: mod_base = OTHER; note = 2'-O-methyl modified nucleotide
  modified_base 33: mod_base = OTHER; note = 2'-O-methyl modified nucleotide
  modified_base 34: mod_base = OTHER; note = 2'-O-methyl modified nucleotide
  modified_base 35: mod_base = OTHER; note = 2'-O-methyl modified nucleotide
  modified_base 36: mod_base = OTHER; note = 2'-O-methyl modified nucleotide
  modified_base 37: mod_base = OTHER; note = 2'-O-methyl modified nucleotide
  modified_base 38: mod_base = OTHER; note = 2'-O-methyl modified nucleotide
  modified_base 39: mod_base = OTHER; note = 2'-O-methyl modified nucleotide
  modified_base 40: mod_base = OTHER; note = 2'-O-methyl modified nucleotide
  modified_base 69: mod_base = OTHER; note = 2'-O-methyl modified nucleotide
  modified_base 70: mod_base = OTHER; note = 2'-O-methyl modified nucleotide
  modified_base 71: mod_base = OTHER; note = 2'-O-methyl modified nucleotide
  modified_base 72: mod_base = OTHER; note = 2'-O-methyl modified nucleotide
  modified_base 73: mod_base = OTHER; note = 2'-O-methyl modified nucleotide
  modified_base 74: mod_base = OTHER; note = 2'-O-methyl modified nucleotide
  modified_base 75: mod_base = OTHER; note = 2'-O-methyl modified nucleotide
  modified_base 76: mod_base = OTHER; note = 2'-O-methyl modified nucleotide
  modified_base 77: mod_base = OTHER; note = 2'-O-methyl modified nucleotide
  modified_base 78: mod_base = OTHER; note = 2'-O-methyl modified nucleotide
  modified_base 79: mod_base = OTHER; note = 2'-O-methyl modified nucleotide
  modified_base 80: mod_base = OTHER; note = 2'-O-methyl modified nucleotide
  modified_base 81: mod_base = OTHER; note = 2'-O-methyl modified nucleotide
  modified_base 82: mod_base = OTHER; note = 2'-O-methyl modified nucleotide
  modified_base 83: mod_base = OTHER; note = 2'-O-methyl modified nucleotide
  modified_base 84: mod_base = OTHER; note = 2'-O-methyl modified nucleotide
  modified_base 85: mod_base = OTHER; note = 2'-O-methyl modified nucleotide
  modified_base 86: mod_base = OTHER; note = 2'-O-methyl modified nucleotide
  modified_base 87: mod_base = OTHER; note = 2'-O-methyl modified nucleotide
  modified_base 88: mod_base = OTHER; note = 2'-O-methyl modified nucleotide
  modified_base 89: mod_base = OTHER; note = 2'-O-methyl modified nucleotide
  modified_base 90: mod_base = OTHER; note = 2'-O-methyl modified nucleotide
  modified_base 91: mod_base = OTHER; note = 2'-O-methyl modified nucleotide
  modified_base 92: mod_base = OTHER; note = 2'-O-methyl modified nucleotide
  modified_base 93: mod_base = OTHER; note = 2'-O-methyl modified nucleotide
  modified_base 94: mod_base = OTHER; note = 2'-O-methyl modified nucleotide
  modified_base 95: mod_base = OTHER; note = 2'-O-methyl modified nucleotide
  modified_base 96: mod_base = OTHER; note = 2'-O-methyl modified nucleotide
  modified_base 128: mod_base = OTHER; note = Nucleotide with phosphorothioate linkage
  modified_base 129: mod_base = OTHER; note = 2'-O-methyl modified nucleotide with phosphorothioate linkage
  modified_base 130: mod_base = OTHER; note = 2'-O-methyl modified nucleotide with phosphorothioate linkage
  modified_base 131: mod_base = OTHER; note = 2'-O-methyl modified nucleotide
gctggtacacggcagggtcagttttagagctagaaatagcaagttaaaataaggctagtccgttatcaacttgaaaaagtggcaccgagtcggtgcagatatccagaaccctagtgtgaccctgccgtgta

SEQ ID NO: 16621 - RNA, 130 nt, synthetic construct
  source 1..130: mol_type = other RNA
  modified_base 1: mod_base = OTHER; note = 2'-O-methyl modified nucleotide with phosphorothioate linkage
  modified_base 2: mod_base = OTHER; note = 2'-O-methyl modified nucleotide with phosphorothioate linkage
  modified_base 3: mod_base = OTHER; note = 2'-O-methyl modified nucleotide with phosphorothioate linkage
  modified_base 29: mod_base = OTHER; note = 2'-O-methyl modified nucleotide
  modified_base 30: mod_base = OTHER; note = 2'-O-methyl modified nucleotide
  modified_base 31: mod_base = OTHER; note = 2'-O-methyl modified nucleotide
  modified_base 32: mod_base = OTHER; note = 2'-O-methyl modified nucleotide
  modified_base 33: mod_base = OTHER; note = 2'-O-methyl modified nucleotide
  modified_base 34: mod_base = OTHER; note = 2'-O-methyl modified nucleotide
  modified_base 35: mod_base = OTHER; note = 2'-O-methyl modified nucleotide
  modified_base 36: mod_base = OTHER; note = 2'-O-methyl modified nucleotide
  modified_base 37: mod_base = OTHER; note = 2'-O-methyl modified nucleotide
  modified_base 38: mod_base = OTHER; note = 2'-O-methyl modified nucleotide
  modified_base 39: mod_base = OTHER; note = 2'-O-methyl modified nucleotide
  modified_base 40: mod_base = OTHER; note = 2'-O-methyl modified nucleotide
  modified_base 69: mod_base = OTHER; note = 2'-O-methyl modified nucleotide
  modified_base 70: mod_base = OTHER; note = 2'-O-methyl modified nucleotide
  modified_base 71: mod_base = OTHER; note = 2'-O-methyl modified nucleotide
  modified_base 72: mod_base = OTHER; note = 2'-O-methyl modified nucleotide
  modified_base 73: mod_base = OTHER; note = 2'-O-methyl modified nucleotide
  modified_base 74: mod_base = OTHER; note = 2'-O-methyl modified nucleotide
  modified_base 75: mod_base = OTHER; note = 2'-O-methyl modified nucleotide
  modified_base 76: mod_base = OTHER; note = 2'-O-methyl modified nucleotide
  modified_base 77: mod_base = OTHER; note = 2'-O-methyl modified nucleotide
  modified_base 78: mod_base = OTHER; note = 2'-O-methyl modified nucleotide
  modified_base 79: mod_base = OTHER; note = 2'-O-methyl modified nucleotide
  modified_base 80: mod_base = OTHER; note = 2'-O-methyl modified nucleotide
  modified_base 81: mod_base = OTHER; note = 2'-O-methyl modified nucleotide
  modified_base 82: mod_base = OTHER; note = 2'-O-methyl modified nucleotide
  modified_base 83: mod_base = OTHER; note = 2'-O-methyl modified nucleotide
  modified_base 84: mod_base = OTHER; note = 2'-O-methyl modified nucleotide
  modified_base 85: mod_base = OTHER; note = 2'-O-methyl modified nucleotide
  modified_base 86: mod_base = OTHER; note = 2'-O-methyl modified nucleotide
  modified_base 87: mod_base = OTHER; note = 2'-O-methyl modified nucleotide
  modified_base 88: mod_base = OTHER; note = 2'-O-methyl modified nucleotide
  modified_base 89: mod_base = OTHER; note = 2'-O-methyl modified nucleotide
  modified_base 90: mod_base = OTHER; note = 2'-O-methyl modified nucleotide
  modified_base 91: mod_base = OTHER; note = 2'-O-methyl modified nucleotide
  modified_base 92: mod_base = OTHER; note = 2'-O-methyl modified nucleotide
  modified_base 93: mod_base = OTHER; note = 2'-O-methyl modified nucleotide
  modified_base 94: mod_base = OTHER; note = 2'-O-methyl modified nucleotide
  modified_base 95: mod_base = OTHER; note = 2'-O-methyl modified nucleotide
  modified_base 96: mod_base = OTHER; note = 2'-O-methyl modified nucleotide
  modified_base 127: mod_base = OTHER; note = Nucleotide with phosphorothioate linkage
  modified_base 128: mod_base = OTHER; note = 2'-O-methyl modified nucleotide with phosphorothioate linkage
  modified_base 129: mod_base = OTHER; note = 2'-O-methyl modified nucleotide with phosphorothioate linkage
  modified_base 130: mod_base = OTHER; note = 2'-O-methyl modified nucleotide
gctggtacacggcagggtcagttttagagctagaaatagcaagttaaaataaggctagtccgttatcaacttgaaaaagtggcaccgagtcggtgcagatatccagaaccctagtgtgaccctgccgtgt

SEQ ID NO: 16622 - RNA, 129 nt, synthetic construct
  source 1..129: mol_type = other RNA
  modified_base 1: mod_base = OTHER; note = 2'-O-methyl modified nucleotide with phosphorothioate linkage
  modified_base 2: mod_base = OTHER; note = 2'-O-methyl modified nucleotide with phosphorothioate linkage
  modified_base 3: mod_base = OTHER; note = 2'-O-methyl modified nucleotide with phosphorothioate linkage
  modified_base 29: mod_base = OTHER; note = 2'-O-methyl modified nucleotide
  modified_base 30: mod_base = OTHER; note = 2'-O-methyl modified nucleotide
  modified_base 31: mod_base = OTHER; note = 2'-O-methyl modified nucleotide
  modified_base 32: mod_base = OTHER; note = 2'-O-methyl modified nucleotide
  modified_base 33: mod_base = OTHER; note = 2'-O-methyl modified nucleotide
  modified_base 34: mod_base = OTHER; note = 2'-O-methyl modified nucleotide
  modified_base 35: mod_base = OTHER; note = 2'-O-methyl modified nucleotide
  modified_base 36: mod_base = OTHER; note = 2'-O-methyl modified nucleotide
  modified_base 37: mod_base = OTHER; note = 2'-O-methyl modified nucleotide
  modified_base 38: mod_base = OTHER; note = 2'-O-methyl modified nucleotide
  modified_base 39: mod_base = OTHER; note = 2'-O-methyl modified nucleotide
  modified_base 40: mod_base = OTHER; note = 2'-O-methyl modified nucleotide
  modified_base 69: mod_base = OTHER; note = 2'-O-methyl modified nucleotide
  modified_base 70: mod_base = OTHER; note = 2'-O-methyl modified nucleotide
  modified_base 71: mod_base = OTHER; note = 2'-O-methyl modified nucleotide
  modified_base 72: mod_base = OTHER; note = 2'-O-methyl modified nucleotide
  modified_base 73: mod_base = OTHER; note = 2'-O-methyl modified nucleotide
  modified_base 74: mod_base = OTHER; note = 2'-O-methyl modified nucleotide
  modified_base 75: mod_base = OTHER; note = 2'-O-methyl modified nucleotide
  modified_base 76: mod_base = OTHER; note = 2'-O-methyl modified nucleotide
  modified_base 77: mod_base = OTHER; note = 2'-O-methyl modified nucleotide
  modified_base 78: mod_base = OTHER; note = 2'-O-methyl modified nucleotide
  modified_base 79: mod_base = OTHER; note = 2'-O-methyl modified nucleotide
  modified_base 80: mod_base = OTHER; note = 2'-O-methyl modified nucleotide
  modified_base 81: mod_base = OTHER; note = 2'-O-methyl modified nucleotide
  modified_base 82: mod_base = OTHER; note = 2'-O-methyl modified nucleotide
  modified_base 83: mod_base = OTHER; note = 2'-O-methyl modified nucleotide
  modified_base 84: mod_base = OTHER; note = 2'-O-methyl modified nucleotide
  modified_base 85: mod_base = OTHER; note = 2'-O-methyl modified nucleotide
  modified_base 86: mod_base = OTHER; note = 2'-O-methyl modified nucleotide
  modified_base 87: mod_base = OTHER; note = 2'-O-methyl modified nucleotide
  modified_base 88: mod_base = OTHER; note = 2'-O-methyl modified nucleotide
  modified_base 89: mod_base = OTHER; note = 2'-O-methyl modified nucleotide
  modified_base 90: mod_base = OTHER; note = 2'-O-methyl modified nucleotide
  modified_base 91: mod_base = OTHER; note = 2'-O-methyl modified nucleotide
  modified_base 92: mod_base = OTHER; note = 2'-O-methyl modified nucleotide
  modified_base 93: mod_base = OTHER; note = 2'-O-methyl modified nucleotide
  modified_base 94: mod_base = OTHER; note = 2'-O-methyl modified nucleotide
  modified_base 95: mod_base = OTHER; note = 2'-O-methyl modified nucleotide
  modified_base 96: mod_base = OTHER; note = 2'-O-methyl modified nucleotide
  modified_base 126: mod_base = OTHER; note = Nucleotide with phosphorothioate linkage
  modified_base 127: mod_base = OTHER; note = 2'-O-methyl modified nucleotide with phosphorothioate linkage
  modified_base 128: mod_base = OTHER; note = 2'-O-methyl modified nucleotide with phosphorothioate linkage
  modified_base 129: mod_base = OTHER; note = 2'-O-methyl modified nucleotide
gctggtacacggcagggtcagttttagagctagaaatagcaagttaaaataaggctagtccgttatcaacttgaaaaagtggcaccgagtcggtgcagatatccagaaccctagtgtgaccctgccgtg

SEQ ID NO: 16623 - RNA, 128 nt, synthetic construct
  source 1..128: mol_type = other RNA
  modified_base 1: mod_base = OTHER; note = 2'-O-methyl modified nucleotide with phosphorothioate linkage
  modified_base 2: mod_base = OTHER; note = 2'-O-methyl modified nucleotide with phosphorothioate linkage
  modified_base 3: mod_base = OTHER; note = 2'-O-methyl modified nucleotide with phosphorothioate linkage
  modified_base 29: mod_base = OTHER; note = 2'-O-methyl modified nucleotide
  modified_base 30: mod_base = OTHER; note = 2'-O-methyl modified nucleotide
  modified_base 31: mod_base = OTHER; note = 2'-O-methyl modified nucleotide
  modified_base 32: mod_base = OTHER; note = 2'-O-methyl modified nucleotide
  modified_base 33: mod_base = OTHER; note = 2'-O-methyl modified nucleotide
  modified_base 34: mod_base = OTHER; note = 2'-O-methyl modified nucleotide
  modified_base 35: mod_base = OTHER; note = 2'-O-methyl modified nucleotide
  modified_base 36: mod_base = OTHER; note = 2'-O-methyl modified nucleotide
  modified_base 37: mod_base = OTHER; note = 2'-O-methyl modified nucleotide
  modified_base 38: mod_base = OTHER; note = 2'-O-methyl modified nucleotide
  modified_base 39: mod_base = OTHER; note = 2'-O-methyl modified nucleotide
  modified_base 40: mod_base = OTHER; note = 2'-O-methyl modified nucleotide
  modified_base 69: mod_base = OTHER; note = 2'-O-methyl modified nucleotide
  modified_base 70: mod_base = OTHER; note = 2'-O-methyl modified nucleotide
  modified_base 71: mod_base = OTHER; note = 2'-O-methyl modified nucleotide
  modified_base 72: mod_base = OTHER; note = 2'-O-methyl modified nucleotide
  modified_base 73: mod_base = OTHER; note = 2'-O-methyl modified nucleotide
  modified_base 74: mod_base = OTHER; note = 2'-O-methyl modified nucleotide
  modified_base 75: mod_base = OTHER; note = 2'-O-methyl modified nucleotide
  modified_base 76: mod_base = OTHER; note = 2'-O-methyl modified nucleotide
  modified_base 77: mod_base = OTHER; note = 2'-O-methyl modified nucleotide
  modified_base 78: mod_base = OTHER; note = 2'-O-methyl modified nucleotide
  modified_base 79: mod_base = OTHER; note = 2'-O-methyl modified nucleotide
  modified_base 80: mod_base = OTHER; note = 2'-O-methyl modified nucleotide
  modified_base 81: mod_base = OTHER; note = 2'-O-methyl modified nucleotide
  modified_base 82: mod_base = OTHER; note = 2'-O-methyl modified nucleotide
  modified_base 83: mod_base = OTHER; note = 2'-O-methyl modified nucleotide
  modified_base 84: mod_base = OTHER; note = 2'-O-methyl modified nucleotide
  modified_base 85: mod_base = OTHER; note = 2'-O-methyl modified nucleotide
  modified_base 86: mod_base = OTHER; note = 2'-O-methyl modified nucleotide
  modified_base 87: mod_base = OTHER; note = 2'-O-methyl modified nucleotide
  modified_base 88: mod_base = OTHER; note = 2'-O-methyl modified nucleotide
  modified_base 89: mod_base = OTHER; note = 2'-O-methyl modified nucleotide
  modified_base 90: mod_base = OTHER; note = 2'-O-methyl modified nucleotide
  modified_base 91: mod_base = OTHER; note = 2'-O-methyl modified nucleotide
  modified_base 92: mod_base = OTHER; note = 2'-O-methyl modified nucleotide
  modified_base 93: mod_base = OTHER; note = 2'-O-methyl modified nucleotide
  modified_base 94: mod_base = OTHER; note = 2'-O-methyl modified nucleotide
  modified_base 95: mod_base = OTHER; note = 2'-O-methyl modified nucleotide
  modified_base 96: mod_base = OTHER; note = 2'-O-methyl modified nucleotide
  modified_base 125: mod_base = OTHER; note = Nucleotide with phosphorothioate linkage
  modified_base 126: mod_base = OTHER; note = 2'-O-methyl modified nucleotide with phosphorothioate linkage
  modified_base 127: mod_base = OTHER; note = 2'-O-methyl modified nucleotide with phosphorothioate linkage
  modified_base 128: mod_base = OTHER; note = 2'-O-methyl modified nucleotide
gctggtacacggcagggtcagttttagagctagaaatagcaagttaaaataaggctagtccgttatcaacttgaaaaagtggcaccgagtcggtgcagatatccagaaccctagtgtgaccctgccgt

SEQ ID NO: 16624 - RNA, 127 nt, synthetic construct
  source 1..127: mol_type = other RNA
  modified_base 1: mod_base = OTHER; note = 2'-O-methyl modified nucleotide with phosphorothioate linkage
  modified_base 2: mod_base = OTHER; note = 2'-O-methyl modified nucleotide with phosphorothioate linkage
  modified_base 3: mod_base = OTHER; note = 2'-O-methyl modified nucleotide with phosphorothioate linkage
  modified_base 29: mod_base = OTHER; note = 2'-O-methyl modified nucleotide
  modified_base 30: mod_base = OTHER; note = 2'-O-methyl modified nucleotide
  modified_base 31: mod_base = OTHER; note = 2'-O-methyl modified nucleotide
  modified_base 32: mod_base = OTHER; note = 2'-O-methyl modified nucleotide
  modified_base 33: mod_base = OTHER; note = 2'-O-methyl modified nucleotide
  modified_base 34: mod_base = OTHER; note = 2'-O-methyl modified nucleotide
  modified_base 35: mod_base = OTHER; note = 2'-O-methyl modified nucleotide
  modified_base 36: mod_base = OTHER; note = 2'-O-methyl modified nucleotide
  modified_base 37: mod_base = OTHER; note = 2'-O-methyl modified nucleotide
  modified_base 38: mod_base = OTHER; note = 2'-O-methyl modified nucleotide
  modified_base 39: mod_base = OTHER; note = 2'-O-methyl modified nucleotide
  modified_base 40: mod_base = OTHER; note = 2'-O-methyl modified nucleotide
  modified_base 69: mod_base = OTHER; note = 2'-O-methyl modified nucleotide
  modified_base 70: mod_base = OTHER; note = 2'-O-methyl modified nucleotide
  modified_base 71: mod_base = OTHER; note = 2'-O-methyl modified nucleotide
  modified_base 72: mod_base = OTHER; note = 2'-O-methyl modified nucleotide
  modified_base 73: mod_base = OTHER; note = 2'-O-methyl modified nucleotide
  modified_base 74: mod_base = OTHER; note = 2'-O-methyl modified nucleotide
  modified_base 75: mod_base = OTHER; note = 2'-O-methyl modified nucleotide
  modified_base 76: mod_base = OTHER; note = 2'-O-methyl modified nucleotide
  modified_base 77: mod_base = OTHER; note = 2'-O-methyl modified nucleotide
  modified_base 78: mod_base = OTHER; note = 2'-O-methyl modified nucleotide
  modified_base 79: mod_base = OTHER; note = 2'-O-methyl modified nucleotide
  modified_base 80: mod_base = OTHER; note = 2'-O-methyl modified nucleotide
  modified_base 81: mod_base = OTHER; note = 2'-O-methyl modified nucleotide
  modified_base 82: mod_base = OTHER; note = 2'-O-methyl modified nucleotide
  modified_base 83: mod_base = OTHER; note = 2'-O-methyl modified nucleotide
  modified_base 84: mod_base = OTHER; note = 2'-O-methyl modified nucleotide
  modified_base 85: mod_base = OTHER; note = 2'-O-methyl modified nucleotide
  modified_base 86: mod_base = OTHER; note = 2'-O-methyl modified nucleotide
  modified_base 87: mod_base = OTHER; note = 2'-O-methyl modified nucleotide
  modified_base 88: mod_base = OTHER; note = 2'-O-methyl modified nucleotide
  modified_base 89: mod_base = OTHER; note = 2'-O-methyl modified nucleotide
  modified_base 90: mod_base = OTHER; note = 2'-O-methyl modified nucleotide
  modified_base 91: mod_base = OTHER; note = 2'-O-methyl modified nucleotide
  modified_base 92: mod_base = OTHER; note = 2'-O-methyl modified nucleotide
  modified_base 93: mod_base = OTHER; note = 2'-O-methyl modified nucleotide
  modified_base 94: mod_base = OTHER; note = 2'-O-methyl modified nucleotide
  modified_base 95: mod_base = OTHER; note = 2'-O-methyl modified nucleotide
  modified_base 96: mod_base = OTHER; note = 2'-O-methyl modified nucleotide
  modified_base 124: mod_base = OTHER; note = Nucleotide with phosphorothioate linkage
  modified_base 125: mod_base = OTHER; note = 2'-O-methyl modified nucleotide with phosphorothioate linkage
  modified_base 126: mod_base = OTHER; note = 2'-O-methyl modified nucleotide with phosphorothioate linkage
  modified_base 127: mod_base = OTHER; note = 2'-O-methyl modified nucleotide
gctggtacacggcagggtcagttttagagctagaaatagcaagttaaaataaggctagtccgttatcaacttgaaaaagtggcaccgagtcggtgcagatatccagaaccctagtgtgaccctgccg

SEQ ID NO: 16625 - RNA, 134 nt, synthetic construct
  source 1..134: mol_type = other RNA
  modified_base 1: mod_base = OTHER; note = 2'-O-methyl modified nucleotide with phosphorothioate linkage
  modified_base 2: mod_base = OTHER; note = 2'-O-methyl modified nucleotide with phosphorothioate linkage
  modified_base 3: mod_base = OTHER; note = 2'-O-methyl modified nucleotide with phosphorothioate linkage
  modified_base 29: mod_base = OTHER; note = 2'-O-methyl modified nucleotide
  modified_base 30: mod_base = OTHER; note = 2'-O-methyl modified nucleotide
  modified_base 31: mod_base = OTHER; note = 2'-O-methyl modified nucleotide
  modified_base 32: mod_base = OTHER; note = 2'-O-methyl modified nucleotide
  modified_base 33: mod_base = OTHER; note = 2'-O-methyl modified nucleotide
  modified_base 34: mod_base = OTHER; note = 2'-O-methyl modified nucleotide
  modified_base 35: mod_base = OTHER; note = 2'-O-methyl modified nucleotide
  modified_base 36: mod_base = OTHER; note = 2'-O-methyl modified nucleotide
  modified_base 37: mod_base = OTHER; note = 2'-O-methyl modified nucleotide
  modified_base 38: mod_base = OTHER; note = 2'-O-methyl modified nucleotide
  modified_base 39: mod_base = OTHER; note = 2'-O-methyl modified nucleotide
  modified_base 40: mod_base = OTHER; note = 2'-O-methyl modified nucleotide
  modified_base 69: mod_base = OTHER; note = 2'-O-methyl modified nucleotide
  modified_base 70: mod_base = OTHER; note = 2'-O-methyl modified nucleotide
  modified_base 71: mod_base = OTHER; note = 2'-O-methyl modified nucleotide
  modified_base 72: mod_base = OTHER; note = 2'-O-methyl modified nucleotide
  modified_base 73: mod_base = OTHER; note = 2'-O-methyl modified nucleotide
  modified_base 74: mod_base = OTHER; note = 2'-O-methyl modified nucleotide
  modified_base 75: mod_base = OTHER; note = 2'-O-methyl modified nucleotide
  modified_base 76: mod_base = OTHER; note = 2'-O-methyl modified nucleotide
  modified_base 77: mod_base = OTHER; note = 2'-O-methyl modified nucleotide
  modified_base 78: mod_base = OTHER; note = 2'-O-methyl modified nucleotide
  modified_base 79: mod_base = OTHER; note = 2'-O-methyl modified nucleotide
  modified_base 80: mod_base = OTHER; note = 2'-O-methyl modified nucleotide
  modified_base 81: mod_base = OTHER; note = 2'-O-methyl modified nucleotide
  modified_base 82: mod_base = OTHER; note = 2'-O-methyl modified nucleotide
  modified_base 83: mod_base = OTHER; note = 2'-O-methyl modified nucleotide
  modified_base 84: mod_base = OTHER; note = 2'-O-methyl modified nucleotide
  modified_base 85: mod_base = OTHER; note = 2'-O-methyl modified nucleotide
  modified_base 86: mod_base = OTHER; note = 2'-O-methyl modified nucleotide
  modified_base 87: mod_base = OTHER; note = 2'-O-methyl modified nucleotide
  modified_base 88: mod_base = OTHER; note = 2'-O-methyl modified nucleotide
  modified_base 89: mod_base = OTHER; note = 2'-O-methyl modified nucleotide
  modified_base 90: mod_base = OTHER; note = 2'-O-methyl modified nucleotide
  modified_base 91: mod_base = OTHER; note = 2'-O-methyl modified nucleotide
  modified_base 92: mod_base = OTHER; note = 2'-O-methyl modified nucleotide
  modified_base 93: mod_base = OTHER; note = 2'-O-methyl modified nucleotide
  modified_base 94: mod_base = OTHER; note = 2'-O-methyl modified nucleotide
  modified_base 95: mod_base = OTHER; note = 2'-O-methyl modified nucleotide
  modified_base 96: mod_base = OTHER; note = 2'-O-methyl modified nucleotide
  modified_base 131: mod_base = OTHER; note = Nucleotide with phosphorothioate linkage
  modified_base 132: mod_base = OTHER; note = 2'-O-methyl modified nucleotide with phosphorothioate linkage
  modified_base 133: mod_base = OTHER; note = 2'-O-methyl modified nucleotide with phosphorothioate linkage
  modified_base 134: mod_base = OTHER; note = 2'-O-methyl modified nucleotide
gctggtacacggcagggtcagttttagagctagaaatagcaagttaaaataaggctagtccgttatcaacttgaaaaagtggcaccgagtcggtgcacagatatccagaaccctagtgtgaccctgccgtgtac

SEQ ID NO: 16626 - RNA, 133 nt, synthetic construct
  source 1..133: mol_type = other RNA
  modified_base 1: mod_base = OTHER; note = 2'-O-methyl modified nucleotide with phosphorothioate linkage
  modified_base 2: mod_base = OTHER; note = 2'-O-methyl modified nucleotide with phosphorothioate linkage
  modified_base 3: mod_base = OTHER; note = 2'-O-methyl modified nucleotide with phosphorothioate linkage
  modified_base 29: mod_base = OTHER; note = 2'-O-methyl modified nucleotide
  modified_base 30: mod_base = OTHER; note = 2'-O-methyl modified nucleotide
  modified_base 31: mod_base = OTHER; note = 2'-O-methyl modified nucleotide
  modified_base 32: mod_base = OTHER; note = 2'-O-methyl modified nucleotide
  modified_base 33: mod_base = OTHER; note = 2'-O-methyl modified nucleotide
  modified_base 34: mod_base = OTHER; note = 2'-O-methyl modified nucleotide
  modified_base 35: mod_base = OTHER; note = 2'-O-methyl modified nucleotide
  modified_base 36: mod_base = OTHER; note = 2'-O-methyl modified nucleotide
  modified_base 37: mod_base = OTHER; note = 2'-O-methyl modified nucleotide
  modified_base 38: mod_base = OTHER; note = 2'-O-methyl modified nucleotide
  modified_base 39: mod_base = OTHER; note = 2'-O-methyl modified nucleotide
  modified_base 40: mod_base = OTHER; note = 2'-O-methyl modified nucleotide
  modified_base 69: mod_base = OTHER; note = 2'-O-methyl modified nucleotide
  modified_base 70: mod_base = OTHER; note = 2'-O-methyl modified nucleotide
  modified_base 71: mod_base = OTHER; note = 2'-O-methyl modified nucleotide
  modified_base 72: mod_base = OTHER; note = 2'-O-methyl modified nucleotide
  modified_base 73: mod_base = OTHER; note = 2'-O-methyl modified nucleotide
  modified_base 74: mod_base = OTHER; note = 2'-O-methyl modified nucleotide
  modified_base 75: mod_base = OTHER; note = 2'-O-methyl modified nucleotide
  modified_base 76: mod_base = OTHER; note = 2'-O-methyl modified nucleotide
  modified_base 77: mod_base = OTHER; note = 2'-O-methyl modified nucleotide
  modified_base 78: mod_base = OTHER; note = 2'-O-methyl modified nucleotide
  modified_base 79: mod_base = OTHER; note = 2'-O-methyl modified nucleotide
  modified_base 80: mod_base = OTHER; note = 2'-O-methyl modified nucleotide
  modified_base 81: mod_base = OTHER; note = 2'-O-methyl modified nucleotide
  modified_base 82: mod_base = OTHER; note = 2'-O-methyl modified nucleotide
  modified_base 83: mod_base = OTHER; note = 2'-O-methyl modified nucleotide
  modified_base 84: mod_base = OTHER; note = 2'-O-methyl modified nucleotide
  modified_base 85: mod_base = OTHER; note = 2'-O-methyl modified nucleotide
  modified_base 86: mod_base = OTHER; note = 2'-O-methyl modified nucleotide
  modified_base 87: mod_base = OTHER; note = 2'-O-methyl modified nucleotide
  modified_base 88: mod_base = OTHER; note = 2'-O-methyl modified nucleotide
  modified_base 89: mod_base = OTHER; note = 2'-O-methyl modified nucleotide
  modified_base 90: mod_base = OTHER; note = 2'-O-methyl modified nucleotide
  modified_base 91: mod_base = OTHER; note = 2'-O-methyl modified nucleotide
  modified_base 92: mod_base = OTHER; note = 2'-O-methyl modified nucleotide
  modified_base 93: mod_base = OTHER; note = 2'-O-methyl modified nucleotide
  modified_base 94: mod_base = OTHER; note = 2'-O-methyl modified nucleotide
  modified_base 95: mod_base = OTHER; note = 2'-O-methyl modified nucleotide
  modified_base 96: mod_base = OTHER; note = 2'-O-methyl modified nucleotide
  modified_base 130: mod_base = OTHER; note = Nucleotide with phosphorothioate linkage
  modified_base 131: mod_base = OTHER; note = 2'-O-methyl modified nucleotide with phosphorothioate linkage
  modified_base 132: mod_base = OTHER; note = 2'-O-methyl modified nucleotide with phosphorothioate linkage
  modified_base 133: mod_base = OTHER; note = 2'-O-methyl modified nucleotide
gctggtacacggcagggtcagttttagagctagaaatagcaagttaaaataaggctagtccgttatcaacttgaaaaagtggcaccgagtcggtgcacagatatccagaaccctagtgtgaccctgccgtgta

SEQ ID NO: 16627 - RNA, 132 nt, synthetic construct
  source 1..132: mol_type = other RNA
  modified_base 1: mod_base = OTHER; note = 2'-O-methyl modified nucleotide with phosphorothioate linkage
  modified_base 2: mod_base = OTHER; note = 2'-O-methyl modified nucleotide with phosphorothioate linkage
  modified_base 3: mod_base = OTHER; note = 2'-O-methyl modified nucleotide with phosphorothioate linkage
  modified_base 29: mod_base = OTHER; note = 2'-O-methyl modified nucleotide
  modified_base 30: mod_base = OTHER; note = 2'-O-methyl modified nucleotide
  modified_base 31: mod_base = OTHER; note = 2'-O-methyl modified nucleotide
  modified_base 32: mod_base = OTHER; note = 2'-O-methyl modified nucleotide
  modified_base 33: mod_base = OTHER; note = 2'-O-methyl modified nucleotide
  modified_base 34: mod_base = OTHER; note = 2'-O-methyl modified nucleotide
  modified_base 35: mod_base = OTHER; note = 2'-O-methyl modified nucleotide
  modified_base 36: mod_base = OTHER; note = 2'-O-methyl modified nucleotide
  modified_base 37: mod_base = OTHER; note = 2'-O-methyl modified nucleotide
  modified_base 38: mod_base = OTHER; note = 2'-O-methyl modified nucleotide
  modified_base 39: mod_base = OTHER; note = 2'-O-methyl modified nucleotide
  modified_base 40: mod_base = OTHER; note = 2'-O-methyl modified nucleotide
  modified_base 69: mod_base = OTHER; note = 2'-O-methyl modified nucleotide
  modified_base 70: mod_base = OTHER; note = 2'-O-methyl modified nucleotide
  modified_base 71: mod_base = OTHER; note = 2'-O-methyl modified nucleotide
  modified_base 72: mod_base = OTHER; note = 2'-O-methyl modified nucleotide
  modified_base 73: mod_base = OTHER; note = 2'-O-methyl modified nucleotide
  modified_base 74: mod_base = OTHER; note = 2'-O-methyl modified nucleotide
  modified_base 75: mod_base = OTHER; note = 2'-O-methyl modified nucleotide
  modified_base 76: mod_base = OTHER; note = 2'-O-methyl modified nucleotide
  modified_base 77: mod_base = OTHER; note = 2'-O-methyl modified nucleotide
  modified_base 78: mod_base = OTHER; note = 2'-O-methyl modified nucleotide
  modified_base 79: mod_base = OTHER; note = 2'-O-methyl modified nucleotide
  modified_base 80: mod_base = OTHER; note = 2'-O-methyl modified nucleotide
  modified_base 81: mod_base = OTHER; note = 2'-O-methyl modified nucleotide
  modified_base 82: mod_base = OTHER; note = 2'-O-methyl modified nucleotide
  modified_base 83: mod_base = OTHER; note = 2'-O-methyl modified nucleotide
  modified_base 84: mod_base = OTHER; note = 2'-O-methyl modified nucleotide
  modified_base 85: mod_base = OTHER; note = 2'-O-methyl modified nucleotide
  modified_base 86: mod_base = OTHER; note = 2'-O-methyl modified nucleotide
  modified_base 87: mod_base = OTHER; note = 2'-O-methyl modified nucleotide
  modified_base 88: mod_base = OTHER; note = 2'-O-methyl modified nucleotide
  modified_base 89: mod_base = OTHER; note = 2'-O-methyl modified nucleotide
  modified_base 90: mod_base = OTHER; note = 2'-O-methyl modified nucleotide
  modified_base 91: mod_base = OTHER; note = 2'-O-methyl modified nucleotide
  modified_base 92: mod_base = OTHER; note = 2'-O-methyl modified nucleotide
  modified_base 93: mod_base = OTHER; note = 2'-O-methyl modified nucleotide
  modified_base 94: mod_base = OTHER; note = 2'-O-methyl modified nucleotide
  modified_base 95: mod_base = OTHER; note = 2'-O-methyl modified nucleotide
  modified_base 96: mod_base = OTHER; note = 2'-O-methyl modified nucleotide
  modified_base 129: mod_base = OTHER; note = Nucleotide with phosphorothioate linkage
  modified_base 130: mod_base = OTHER; note = 2'-O-methyl modified nucleotide with phosphorothioate linkage
  modified_base 131: mod_base = OTHER; note = 2'-O-methyl modified nucleotide with phosphorothioate linkage
  modified_base 132: mod_base = OTHER; note = 2'-O-methyl modified nucleotide
gctggtacacggcagggtcagttttagagctagaaatagcaagttaaaataaggctagtccgttatcaacttgaaaaagtggcaccgagtcggtgcacagatatccagaaccctagtgtgaccctgccgtgt

SEQ ID NO: 16628 - RNA, 131 nt, synthetic construct
  source 1..131: mol_type = other RNA
  modified_base 1: mod_base = OTHER; note = 2'-O-methyl modified nucleotide with phosphorothioate linkage
  modified_base 2: mod_base = OTHER; note = 2'-O-methyl modified nucleotide with phosphorothioate linkage
  modified_base 3: mod_base = OTHER; note = 2'-O-methyl modified nucleotide with phosphorothioate linkage
  modified_base 29: mod_base = OTHER; note = 2'-O-methyl modified nucleotide
  modified_base 30: mod_base = OTHER; note = 2'-O-methyl modified nucleotide
  modified_base 31: mod_base = OTHER; note = 2'-O-methyl modified nucleotide
  modified_base 32: mod_base = OTHER; note = 2'-O-methyl modified nucleotide
  modified_base 33: mod_base = OTHER; note = 2'-O-methyl modified nucleotide
  modified_base 34: mod_base = OTHER; note = 2'-O-methyl modified nucleotide
  modified_base 35: mod_base = OTHER; note = 2'-O-methyl modified nucleotide
  modified_base 36: mod_base = OTHER; note = 2'-O-methyl modified nucleotide
  modified_base 37: mod_base = OTHER; note = 2'-O-methyl modified nucleotide
  modified_base 38: mod_base = OTHER; note = 2'-O-methyl modified nucleotide
  modified_base 39: mod_base = OTHER; note = 2'-O-methyl modified nucleotide
  modified_base 40: mod_base = OTHER; note = 2'-O-methyl modified nucleotide
  modified_base 69: mod_base = OTHER; note = 2'-O-methyl modified nucleotide
  modified_base 70: mod_base = OTHER; note = 2'-O-methyl modified nucleotide
  modified_base 71: mod_base = OTHER; note = 2'-O-methyl modified nucleotide
  modified_base 72: mod_base = OTHER; note = 2'-O-methyl modified nucleotide
  modified_base 73: mod_base = OTHER; note = 2'-O-methyl modified nucleotide
  modified_base 74: mod_base = OTHER; note = 2'-O-methyl modified nucleotide
  modified_base 75: mod_base = OTHER; note = 2'-O-methyl modified nucleotide
  modified_base 76: mod_base = OTHER; note = 2'-O-methyl modified nucleotide
  modified_base 77: mod_base = OTHER; note = 2'-O-methyl modified nucleotide
  modified_base 78: mod_base = OTHER; note = 2'-O-methyl modified nucleotide
  modified_base 79: mod_base = OTHER; note = 2'-O-methyl modified nucleotide
  modified_base 80: mod_base = OTHER; note = 2'-O-methyl modified nucleotide
  modified_base 81: mod_base = OTHER; note = 2'-O-methyl modified nucleotide
  modified_base 82: mod_base = OTHER; note = 2'-O-methyl modified nucleotide
  modified_base 83: mod_base = OTHER; note = 2'-O-methyl modified nucleotide
  modified_base 84: mod_base = OTHER; note = 2'-O-methyl modified nucleotide
  modified_base 85: mod_base = OTHER; note = 2'-O-methyl modified nucleotide
  modified_base 86: mod_base = OTHER; note = 2'-O-methyl modified nucleotide
  modified_base 87: mod_base = OTHER; note = 2'-O-methyl modified nucleotide
  modified_base 88: mod_base = OTHER; note = 2'-O-methyl modified nucleotide
  modified_base 89: mod_base = OTHER; note = 2'-O-methyl modified nucleotide
  modified_base 90: mod_base = OTHER; note = 2'-O-methyl modified nucleotide
  modified_base 91: mod_base = OTHER; note = 2'-O-methyl modified nucleotide
  modified_base 92: mod_base = OTHER; note = 2'-O-methyl modified nucleotide
  modified_base 93: mod_base = OTHER; note = 2'-O-methyl modified nucleotide
  modified_base 94: mod_base = OTHER; note = 2'-O-methyl modified nucleotide
  modified_base 95: mod_base = OTHER; note = 2'-O-methyl modified nucleotide
  modified_base 96: mod_base = OTHER; note = 2'-O-methyl modified nucleotide
  modified_base 128: mod_base = OTHER; note = Nucleotide with phosphorothioate linkage
  modified_base 129: mod_base = OTHER; note = 2'-O-methyl modified nucleotide with phosphorothioate linkage
  modified_base 130: mod_base = OTHER; note = 2'-O-methyl modified nucleotide with phosphorothioate linkage
  modified_base 131: mod_base = OTHER; note = 2'-O-methyl modified nucleotide
gctggtacacggcagggtcagttttagagctagaaatagcaagttaaaataaggctagtccgttatcaacttgaaaaagtggcaccgagtcggtgcacagatatccagaaccctagtgtgaccctgccgtg

SEQ ID NO: 16629 - RNA, 130 nt, synthetic construct
  source 1..130: mol_type = other RNA
  modified_base 1: mod_base = OTHER; note = 2'-O-methyl modified nucleotide with phosphorothioate linkage
  modified_base 2: mod_base = OTHER; note = 2'-O-methyl modified nucleotide with phosphorothioate linkage
  modified_base 3: mod_base = OTHER; note = 2'-O-methyl modified nucleotide with phosphorothioate linkage
  modified_base 29: mod_base = OTHER; note = 2'-O-methyl modified nucleotide
  modified_base 30: mod_base = OTHER; note = 2'-O-methyl modified nucleotide
  modified_base 31: mod_base = OTHER; note = 2'-O-methyl modified nucleotide
  modified_base 32: mod_base = OTHER; note = 2'-O-methyl modified nucleotide
  modified_base 33: mod_base = OTHER; note = 2'-O-methyl modified nucleotide
  modified_base 34: mod_base = OTHER; note = 2'-O-methyl modified nucleotide
  modified_base 35: mod_base = OTHER; note = 2'-O-methyl modified nucleotide
  modified_base 36: mod_base = OTHER; note = 2'-O-methyl modified nucleotide
  modified_base 37: mod_base = OTHER; note = 2'-O-methyl modified nucleotide
  modified_base 38: mod_base = OTHER; note = 2'-O-methyl modified nucleotide
  modified_base 39: mod_base = OTHER; note = 2'-O-methyl modified nucleotide
  modified_base 40: mod_base = OTHER; note = 2'-O-methyl modified nucleotide
  modified_base 69: mod_base = OTHER; note = 2'-O-methyl modified nucleotide
  modified_base 70: mod_base = OTHER; note = 2'-O-methyl modified nucleotide
  modified_base 71: mod_base = OTHER; note = 2'-O-methyl modified nucleotide
  modified_base 72: mod_base = OTHER; note = 2'-O-methyl modified nucleotide
  modified_base 73: mod_base = OTHER; note = 2'-O-methyl modified nucleotide
  modified_base 74: mod_base = OTHER; note = 2'-O-methyl modified nucleotide
  modified_base 75: mod_base = OTHER; note = 2'-O-methyl modified nucleotide
  modified_base 76: mod_base = OTHER; note = 2'-O-methyl modified nucleotide
  modified_base 77: mod_base = OTHER; note = 2'-O-methyl modified nucleotide
  modified_base 78: mod_base = OTHER; note = 2'-O-methyl modified nucleotide
  modified_base 79: mod_base = OTHER; note = 2'-O-methyl modified nucleotide
  modified_base 80: mod_base = OTHER; note = 2'-O-methyl modified nucleotide
  modified_base 81: mod_base = OTHER; note = 2'-O-methyl modified nucleotide
  modified_base 82: mod_base = OTHER; note = 2'-O-methyl modified nucleotide
  modified_base 83: mod_base = OTHER; note = 2'-O-methyl modified nucleotide
  modified_base 84: mod_base = OTHER; note = 2'-O-methyl modified nucleotide
  modified_base 85: mod_base = OTHER; note = 2'-O-methyl modified nucleotide
  modified_base 86: mod_base = OTHER; note = 2'-O-methyl modified nucleotide
  modified_base 87: mod_base = OTHER; note = 2'-O-methyl modified nucleotide
  modified_base 88: mod_base = OTHER; note = 2'-O-methyl modified nucleotide
  modified_base 89: mod_base = OTHER; note = 2'-O-methyl modified nucleotide
  modified_base 90: mod_base = OTHER; note = 2'-O-methyl modified nucleotide
  modified_base 91: mod_base = OTHER; note = 2'-O-methyl modified nucleotide
  modified_base 92: mod_base = OTHER; note = 2'-O-methyl modified nucleotide
  modified_base 93: mod_base = OTHER; note = 2'-O-methyl modified nucleotide
  modified_base 94: mod_base = OTHER; note = 2'-O-methyl modified nucleotide
  modified_base 95: mod_base = OTHER; note = 2'-O-methyl modified nucleotide
  modified_base 96: mod_base = OTHER; note = 2'-O-methyl modified nucleotide
  modified_base 127: mod_base = OTHER; note = Nucleotide with phosphorothioate linkage
  modified_base 128: mod_base = OTHER; note = 2'-O-methyl modified nucleotide with phosphorothioate linkage
  modified_base 129: mod_base = OTHER; note = 2'-O-methyl modified nucleotide with phosphorothioate linkage
  modified_base 130: mod_base = OTHER; note = 2'-O-methyl modified nucleotide
gctggtacacggcagggtcagttttagagctagaaatagcaagttaaaataaggctagtccgttatcaacttgaaaaagtggcaccgagtcggtgcacagatatccagaaccctagtgtgaccctgccgt

SEQ ID NO: 16630 - RNA, 129 nt, synthetic construct
  source 1..129: mol_type = other RNA
  modified_base 1: mod_base = OTHER; note = 2'-O-methyl modified nucleotide with phosphorothioate linkage
  modified_base 2: mod_base = OTHER; note = 2'-O-methyl modified nucleotide with phosphorothioate linkage
  modified_base 3: mod_base = OTHER; note = 2'-O-methyl modified nucleotide with phosphorothioate linkage
  modified_base 29: mod_base = OTHER; note = 2'-O-methyl modified nucleotide
  modified_base 30: mod_base = OTHER; note = 2'-O-methyl modified nucleotide
  modified_base 31: mod_base = OTHER; note = 2'-O-methyl modified nucleotide
  modified_base 32: mod_base = OTHER; note = 2'-O-methyl modified nucleotide
  modified_base 33: mod_base = OTHER; note = 2'-O-methyl modified nucleotide
  modified_base 34: mod_base = OTHER; note = 2'-O-methyl modified nucleotide
  modified_base 35: mod_base = OTHER; note = 2'-O-methyl modified nucleotide
  modified_base 36: mod_base = OTHER; note = 2'-O-methyl modified nucleotide
  modified_base 37: mod_base = OTHER; note = 2'-O-methyl modified nucleotide
  modified_base 38: mod_base = OTHER; note = 2'-O-methyl modified nucleotide
  modified_base 39: mod_base = OTHER; note = 2'-O-methyl modified nucleotide
  modified_base 40: mod_base = OTHER; note = 2'-O-methyl modified nucleotide
  modified_base 69: mod_base = OTHER; note = 2'-O-methyl modified nucleotide
  modified_base 70: mod_base = OTHER; note = 2'-O-methyl modified nucleotide
  modified_base 71: mod_base = OTHER; note = 2'-O-methyl modified nucleotide
  modified_base 72: mod_base = OTHER; note = 2'-O-methyl modified nucleotide
  modified_base 73: mod_base = OTHER; note = 2'-O-methyl modified nucleotide
  modified_base 74: mod_base = OTHER; note = 2'-O-methyl modified nucleotide
  modified_base 75: mod_base = OTHER; note = 2'-O-methyl modified nucleotide
  modified_base 76: mod_base = OTHER; note = 2'-O-methyl modified nucleotide
  modified_base 77: mod_base = OTHER; note = 2'-O-methyl modified nucleotide
  modified_base 78: mod_base = OTHER; note = 2'-O-methyl modified nucleotide
  modified_base 79: mod_base = OTHER; note = 2'-O-methyl modified nucleotide
  modified_base 80: mod_base = OTHER; note = 2'-O-methyl modified nucleotide
  modified_base 81: mod_base = OTHER; note = 2'-O-methyl modified nucleotide
  modified_base 82: mod_base = OTHER; note = 2'-O-methyl modified nucleotide
  modified_base 83: mod_base = OTHER; note = 2'-O-methyl modified nucleotide
  modified_base 84: mod_base = OTHER; note = 2'-O-methyl modified nucleotide
  modified_base 85: mod_base = OTHER; note = 2'-O-methyl modified nucleotide
  modified_base 86: mod_base = OTHER; note = 2'-O-methyl modified nucleotide
  modified_base 87: mod_base = OTHER; note = 2'-O-methyl modified nucleotide
  modified_base 88: mod_base = OTHER; note = 2'-O-methyl modified nucleotide
  modified_base 89: mod_base = OTHER; note = 2'-O-methyl modified nucleotide
  modified_base 90: mod_base = OTHER; note = 2'-O-methyl modified nucleotide
  modified_base 91: mod_base = OTHER; note = 2'-O-methyl modified nucleotide
  modified_base 92: mod_base = OTHER; note = 2'-O-methyl modified nucleotide
  modified_base 93: mod_base = OTHER; note = 2'-O-methyl modified nucleotide
  modified_base 94: mod_base = OTHER; note = 2'-O-methyl modified nucleotide
  modified_base 95: mod_base = OTHER; note = 2'-O-methyl modified nucleotide
  modified_base 96: mod_base = OTHER; note = 2'-O-methyl modified nucleotide
  modified_base 126: mod_base = OTHER; note = Nucleotide with phosphorothioate linkage
  modified_base 127: mod_base = OTHER; note = 2'-O-methyl modified nucleotide with phosphorothioate linkage
  modified_base 128: mod_base = OTHER; note = 2'-O-methyl modified nucleotide with phosphorothioate linkage
  modified_base 129: mod_base = OTHER; note = 2'-O-methyl modified nucleotide
gctggtacacggcagggtcagttttagagctagaaatagcaagttaaaataaggctagtccgttatcaacttgaaaaagtggcaccgagtcggtgcacagatatccagaaccctagtgtgaccctgccg

SEQ ID NO: 16631 - RNA, 124 nt, synthetic construct
  source 1..124: mol_type = other RNA
  modified_base 1: mod_base = OTHER; note = 2'-O-methyl modified nucleotide with phosphorothioate linkage
  modified_base 2: mod_base = OTHER; note = 2'-O-methyl modified nucleotide with phosphorothioate linkage
  modified_base 3: mod_base = OTHER; note = 2'-O-methyl modified nucleotide with phosphorothioate linkage
  modified_base 29: mod_base = OTHER; note = 2'-O-methyl modified nucleotide
  modified_base 30: mod_base = OTHER; note = 2'-O-methyl modified nucleotide
  modified_base 31: mod_base = OTHER; note = 2'-O-methyl modified nucleotide
  modified_base 32: mod_base = OTHER; note = 2'-O-methyl modified nucleotide
  modified_base 33: mod_base = OTHER; note = 2'-O-methyl modified nucleotide
  modified_base 34: mod_base = OTHER; note = 2'-O-methyl modified nucleotide
  modified_base 35: mod_base = OTHER; note = 2'-O-methyl modified nucleotide
  modified_base 36: mod_base = OTHER; note = 2'-O-methyl modified nucleotide
  modified_base 37: mod_base = OTHER; note = 2'-O-methyl modified nucleotide
  modified_base 38: mod_base = OTHER; note = 2'-O-methyl modified nucleotide
  modified_base 39: mod_base = OTHER; note = 2'-O-methyl modified nucleotide
  modified_base 40: mod_base = OTHER; note = 2'-O-methyl modified nucleotide
  modified_base 69: mod_base = OTHER; note = 2'-O-methyl modified nucleotide
  modified_base 70: mod_base = OTHER; note = 2'-O-methyl modified nucleotide
  modified_base 71: mod_base = OTHER; note = 2'-O-methyl modified nucleotide
  modified_base 72: mod_base = OTHER; note = 2'-O-methyl modified nucleotide
  modified_base 73: mod_base = OTHER; note = 2'-O-methyl modified nucleotide
  modified_base 74: mod_base = OTHER; note = 2'-O-methyl modified nucleotide
  modified_base 75: mod_base = OTHER; note = 2'-O-methyl modified nucleotide
  modified_base 76: mod_base = OTHER; note = 2'-O-methyl modified nucleotide
  modified_base 77: mod_base = OTHER; note = 2'-O-methyl modified nucleotide
  modified_base 78: mod_base = OTHER; note = 2'-O-methyl modified nucleotide
  modified_base 79: mod_base = OTHER; note = 2'-O-methyl modified nucleotide
  modified_base 80: mod_base = OTHER; note = 2'-O-methyl modified nucleotide
  modified_base 81: mod_base = OTHER; note = 2'-O-methyl modified nucleotide
  modified_base 82: mod_base = OTHER; note = 2'-O-methyl modified nucleotide
  modified_base 83: mod_base = OTHER; note = 2'-O-methyl modified nucleotide
  modified_base 84: mod_base = OTHER; note = 2'-O-methyl modified nucleotide
  modified_base 85: mod_base = OTHER; note = 2'-O-methyl modified nucleotide
  modified_base 86: mod_base = OTHER; note = 2'-O-methyl modified nucleotide
  modified_base 87: mod_base = OTHER; note = 2'-O-methyl modified nucleotide
  modified_base 88: mod_base = OTHER; note = 2'-O-methyl modified nucleotide
  modified_base 89: mod_base = OTHER; note = 2'-O-methyl modified nucleotide
  modified_base 90: mod_base = OTHER; note = 2'-O-methyl modified nucleotide
  modified_base 91: mod_base = OTHER; note = 2'-O-methyl modified nucleotide
  modified_base 92: mod_base = OTHER; note = 2'-O-methyl modified nucleotide
  modified_base 93: mod_base = OTHER; note = 2'-O-methyl modified nucleotide
  modified_base 94: mod_base = OTHER; note = 2'-O-methyl modified nucleotide
  modified_base 95: mod_base = OTHER; note = 2'-O-methyl modified nucleotide
  modified_base 96: mod_base = OTHER; note = 2'-O-methyl modified nucleotide
  modified_base 121: mod_base = OTHER; note = Nucleotide with phosphorothioate linkage
  modified_base 122: mod_base = OTHER; note = 2'-O-methyl modified nucleotide with phosphorothioate linkage
  modified_base 123: mod_base = OTHER; note = 2'-O-methyl modified nucleotide with phosphorothioate linkage
  modified_base 124: mod_base = OTHER; note = 2'-O-methyl modified nucleotide
gctggtacacggcagggtcagttttagagctagaaatagcaagttaaaataaggctagtccgttatcaacttgaaaaagtggcaccgagtcggtgcaaccctagttgatgaccctgccgtgtac

SEQ ID NO: 16632 - RNA, 123 nt, synthetic construct
  source 1..123: mol_type = other RNA
  modified_base 1: mod_base = OTHER; note = 2'-O-methyl modified nucleotide with phosphorothioate linkage
  modified_base 2: mod_base = OTHER; note = 2'-O-methyl modified nucleotide with phosphorothioate linkage
  modified_base 3: mod_base = OTHER; note = 2'-O-methyl modified nucleotide with phosphorothioate linkage
  modified_base 29: mod_base = OTHER; note = 2'-O-methyl modified nucleotide
  modified_base 30: mod_base = OTHER; note = 2'-O-methyl modified nucleotide
  modified_base 31: mod_base = OTHER; note = 2'-O-methyl modified nucleotide
  modified_base 32: mod_base = OTHER; note = 2'-O-methyl modified nucleotide
  modified_base 33: mod_base = OTHER; note = 2'-O-methyl modified nucleotide
  modified_base 34: mod_base = OTHER; note = 2'-O-methyl modified nucleotide
  modified_base 35: mod_base = OTHER; note = 2'-O-methyl modified nucleotide
  modified_base 36: mod_base = OTHER; note = 2'-O-methyl modified nucleotide
  modified_base 37: mod_base = OTHER; note = 2'-O-methyl modified nucleotide
  modified_base 38: mod_base = OTHER; note = 2'-O-methyl modified nucleotide
  modified_base 39: mod_base = OTHER; note = 2'-O-methyl modified nucleotide
  modified_base 40: mod_base = OTHER; note = 2'-O-methyl modified nucleotide
  modified_base 69: mod_base = OTHER; note = 2'-O-methyl modified nucleotide
  modified_base 70: mod_base = OTHER; note = 2'-O-methyl modified nucleotide
  modified_base 71: mod_base = OTHER; note = 2'-O-methyl modified nucleotide
  modified_base 72: mod_base = OTHER; note = 2'-O-methyl modified nucleotide
  modified_base 73: mod_base = OTHER; note = 2'-O-methyl modified nucleotide
  modified_base 74: mod_base = OTHER; note = 2'-O-methyl modified nucleotide
  modified_base 75: mod_base = OTHER; note = 2'-O-methyl modified nucleotide
  modified_base 76: mod_base = OTHER; note = 2'-O-methyl modified nucleotide
  modified_base 77: mod_base = OTHER; note = 2'-O-methyl modified nucleotide
  modified_base 78: mod_base = OTHER; note = 2'-O-methyl modified nucleotide
  modified_base 79: mod_base = OTHER; note = 2'-O-methyl modified nucleotide
  modified_base 80: mod_base = OTHER; note = 2'-O-methyl modified nucleotide
  modified_base 81: mod_base = OTHER; note = 2'-O-methyl modified nucleotide
  modified_base 82: mod_base = OTHER; note = 2'-O-methyl modified nucleotide
  modified_base 83: mod_base = OTHER; note = 2'-O-methyl modified nucleotide
  modified_base 84: mod_base = OTHER; note = 2'-O-methyl modified nucleotide
  modified_base 85: mod_base = OTHER; note = 2'-O-methyl modified nucleotide
  modified_base 86: mod_base = OTHER; note = 2'-O-methyl modified nucleotide
  modified_base 87: mod_base = OTHER; note = 2'-O-methyl modified nucleotide
  modified_base 88: mod_base = OTHER; note = 2'-O-methyl modified nucleotide
  modified_base 89: mod_base = OTHER; note = 2'-O-methyl modified nucleotide
  modified_base 90: mod_base = OTHER; note = 2'-O-methyl modified nucleotide
  modified_base 91: mod_base = OTHER; note = 2'-O-methyl modified nucleotide
  modified_base 92: mod_base = OTHER; note = 2'-O-methyl modified nucleotide
  modified_base 93: mod_base = OTHER; note = 2'-O-methyl modified nucleotide
  modified_base 94: mod_base = OTHER; note = 2'-O-methyl modified nucleotide
  modified_base 95: mod_base = OTHER; note = 2'-O-methyl modified nucleotide
  modified_base 96: mod_base = OTHER; note = 2'-O-methyl modified nucleotide
  modified_base 120: mod_base = OTHER; note = Nucleotide with phosphorothioate linkage
  modified_base 121: mod_base = OTHER; note = 2'-O-methyl modified nucleotide with phosphorothioate linkage
  modified_base 122: mod_base = OTHER; note = 2'-O-methyl modified nucleotide with phosphorothioate linkage
  modified_base 123: mod_base = OTHER; note = 2'-O-methyl modified nucleotide
gctggtacacggcagggtcagttttagagctagaaatagcaagttaaaataaggctagtccgttatcaacttgaaaaagtggcaccgagtcggtgcaaccctagttgatgaccctgccgtgta

SEQ ID NO: 16633 - RNA, 122 nt, synthetic construct
  source 1..122: mol_type = other RNA
  modified_base 1: mod_base = OTHER; note = 2'-O-methyl modified nucleotide with phosphorothioate linkage
  modified_base 2: mod_base = OTHER; note = 2'-O-methyl modified nucleotide with phosphorothioate linkage
  modified_base 3: mod_base = OTHER; note = 2'-O-methyl modified nucleotide with phosphorothioate linkage
  modified_base 29: mod_base = OTHER; note = 2'-O-methyl modified nucleotide
  modified_base 30: mod_base = OTHER; note = 2'-O-methyl modified nucleotide
  modified_base 31: mod_base = OTHER; note = 2'-O-methyl modified nucleotide
  modified_base 32: mod_base = OTHER; note = 2'-O-methyl modified nucleotide
  modified_base 33: mod_base = OTHER; note = 2'-O-methyl modified nucleotide
  modified_base 34: mod_base = OTHER; note = 2'-O-methyl modified nucleotide
  modified_base 35: mod_base = OTHER; note = 2'-O-methyl modified nucleotide
  modified_base 36: mod_base = OTHER; note = 2'-O-methyl modified nucleotide
  modified_base 37: mod_base = OTHER; note = 2'-O-methyl modified nucleotide
  modified_base 38: mod_base = OTHER; note = 2'-O-methyl modified nucleotide
  modified_base 39: mod_base = OTHER; note = 2'-O-methyl modified nucleotide
  modified_base 40: mod_base = OTHER; note = 2'-O-methyl modified nucleotide
  modified_base 69: mod_base = OTHER; note = 2'-O-methyl modified nucleotide
  modified_base 70: mod_base = OTHER; note = 2'-O-methyl modified nucleotide
  modified_base 71: mod_base = OTHER; note = 2'-O-methyl modified nucleotide
  modified_base 72: mod_base = OTHER; note = 2'-O-methyl modified nucleotide
  modified_base 73: mod_base = OTHER; note = 2'-O-methyl modified nucleotide
  modified_base 74: mod_base = OTHER; note = 2'-O-methyl modified nucleotide
  modified_base 75: mod_base = OTHER; note = 2'-O-methyl modified nucleotide
  modified_base 76: mod_base = OTHER; note = 2'-O-methyl modified nucleotide
  modified_base 77: mod_base = OTHER; note = 2'-O-methyl modified nucleotide
  modified_base 78: mod_base = OTHER; note = 2'-O-methyl modified nucleotide
  modified_base 79: mod_base = OTHER; note = 2'-O-methyl modified nucleotide
  modified_base 80: mod_base = OTHER; note = 2'-O-methyl modified nucleotide
  modified_base 81: mod_base = OTHER; note = 2'-O-methyl modified nucleotide
  modified_base 82: mod_base = OTHER; note = 2'-O-methyl modified nucleotide
  modified_base 83: mod_base = OTHER; note = 2'-O-methyl modified nucleotide
  modified_base 84: mod_base = OTHER; note = 2'-O-methyl modified nucleotide
  modified_base 85: mod_base = OTHER; note = 2'-O-methyl modified nucleotide
  modified_base 86: mod_base = OTHER; note = 2'-O-methyl modified nucleotide
  modified_base 87: mod_base = OTHER; note = 2'-O-methyl modified nucleotide
  modified_base 88: mod_base = OTHER; note = 2'-O-methyl modified nucleotide
  modified_base 89: mod_base = OTHER; note = 2'-O-methyl modified nucleotide
  modified_base 90: mod_base = OTHER; note = 2'-O-methyl modified nucleotide
  modified_base 91: mod_base = OTHER; note = 2'-O-methyl modified nucleotide
  modified_base 92: mod_base = OTHER; note = 2'-O-methyl modified nucleotide
  modified_base 93: mod_base = OTHER; note = 2'-O-methyl modified nucleotide
  modified_base 94: mod_base = OTHER; note = 2'-O-methyl modified nucleotide
  modified_base 95: mod_base = OTHER; note = 2'-O-methyl modified nucleotide
  modified_base 96: mod_base = OTHER; note = 2'-O-methyl modified nucleotide
  modified_base 119: mod_base = OTHER; note = Nucleotide with phosphorothioate linkage
  modified_base 120: mod_base = OTHER; note = 2'-O-methyl modified nucleotide with phosphorothioate linkage
  modified_base 121: mod_base = OTHER; note = 2'-O-methyl modified nucleotide with phosphorothioate linkage
  modified_base 122: mod_base = OTHER; note = 2'-O-methyl modified nucleotide
gctggtacacggcagggtcagttttagagctagaaatagcaagttaaaataaggctagtccgttatcaacttgaaaaagtggcaccgagtcggtgcaaccctagttgatgaccctgccgtgt

SEQ ID NO: 16634 - RNA, 121 nt, synthetic construct
  source 1..121: mol_type = other RNA
  modified_base 1: mod_base = OTHER; note = 2'-O-methyl modified nucleotide with phosphorothioate linkage
  modified_base 2: mod_base = OTHER; note = 2'-O-methyl modified nucleotide with phosphorothioate linkage
  modified_base 3: mod_base = OTHER; note = 2'-O-methyl modified nucleotide with phosphorothioate linkage
  modified_base 29: mod_base = OTHER; note = 2'-O-methyl modified nucleotide
  modified_base 30: mod_base = OTHER; note = 2'-O-methyl modified nucleotide
  modified_base 31: mod_base = OTHER; note = 2'-O-methyl modified nucleotide
  modified_base 32: mod_base = OTHER; note = 2'-O-methyl modified nucleotide
  modified_base 33: mod_base = OTHER; note = 2'-O-methyl modified nucleotide
  modified_base 34: mod_base = OTHER; note = 2'-O-methyl modified nucleotide
  modified_base 35: mod_base = OTHER; note = 2'-O-methyl modified nucleotide
  modified_base 36: mod_base = OTHER; note = 2'-O-methyl modified nucleotide
  modified_base 37: mod_base = OTHER; note = 2'-O-methyl modified nucleotide
  modified_base 38: mod_base = OTHER; note = 2'-O-methyl modified nucleotide
  modified_base 39: mod_base = OTHER; note = 2'-O-methyl modified nucleotide
  modified_base 40: mod_base = OTHER; note = 2'-O-methyl modified nucleotide
  modified_base 69: mod_base = OTHER; note = 2'-O-methyl modified nucleotide
  modified_base 70: mod_base = OTHER; note = 2'-O-methyl modified nucleotide
  modified_base 71: mod_base = OTHER; note = 2'-O-methyl modified nucleotide
  modified_base 72: mod_base = OTHER; note = 2'-O-methyl modified nucleotide
  modified_base 73: mod_base = OTHER; note = 2'-O-methyl modified nucleotide
  modified_base 74: mod_base = OTHER; note = 2'-O-methyl modified nucleotide
  modified_base 75: mod_base = OTHER; note = 2'-O-methyl modified nucleotide
  modified_base 76: mod_base = OTHER; note = 2'-O-methyl modified nucleotide
  modified_base 77: mod_base = OTHER; note = 2'-O-methyl modified nucleotide
  modified_base 78: mod_base = OTHER; note = 2'-O-methyl modified nucleotide
  modified_base 79: mod_base = OTHER; note = 2'-O-methyl modified nucleotide
  modified_base 80: mod_base = OTHER; note = 2'-O-methyl modified nucleotide
  modified_base 81: mod_base = OTHER; note = 2'-O-methyl modified nucleotide
  modified_base 82: mod_base = OTHER; note = 2'-O-methyl modified nucleotide
  modified_base 83: mod_base = OTHER; note = 2'-O-methyl modified nucleotide
  modified_base 84: mod_base = OTHER; note = 2'-O-methyl modified nucleotide
  modified_base 85: mod_base = OTHER; note = 2'-O-methyl modified nucleotide
  modified_base 86: mod_base = OTHER; note = 2'-O-methyl modified nucleotide
  modified_base 87: mod_base = OTHER; note = 2'-O-methyl modified nucleotide
  modified_base 88: mod_base = OTHER; note = 2'-O-methyl modified nucleotide
  modified_base 89: mod_base = OTHER; note = 2'-O-methyl modified nucleotide
  modified_base 90: mod_base = OTHER; note = 2'-O-methyl modified nucleotide
  modified_base 91: mod_base = OTHER; note = 2'-O-methyl modified nucleotide
  modified_base 92: mod_base = OTHER; note = 2'-O-methyl modified nucleotide
  modified_base 93: mod_base = OTHER; note = 2'-O-methyl modified nucleotide
  modified_base 94: mod_base = OTHER; note = 2'-O-methyl modified nucleotide
  modified_base 95: mod_base = OTHER; note = 2'-O-methyl modified nucleotide
  modified_base 96: mod_base = OTHER; note = 2'-O-methyl modified nucleotide
  modified_base 118: mod_base = OTHER; note = Nucleotide with phosphorothioate linkage
  modified_base 119: mod_base = OTHER; note = 2'-O-methyl modified nucleotide with phosphorothioate linkage
  modified_base 120: mod_base = OTHER; note = 2'-O-methyl modified nucleotide with phosphorothioate linkage
  modified_base 121: mod_base = OTHER; note = 2'-O-methyl modified nucleotide
gctggtacacggcagggtcagttttagagctagaaatagcaagttaaaataaggctagtccgttatcaacttgaaaaagtggcaccgagtcggtgcaaccctagttgatgaccctgccgtg

SEQ ID NO: 16635 - RNA, 120 nt, synthetic construct
  source 1..120: mol_type = other RNA
  modified_base 1: mod_base = OTHER; note = 2'-O-methyl modified nucleotide with phosphorothioate linkage
  modified_base 2: mod_base = OTHER; note = 2'-O-methyl modified nucleotide with phosphorothioate linkage
  modified_base 3: mod_base = OTHER; note = 2'-O-methyl modified nucleotide with phosphorothioate linkage
  modified_base 29: mod_base = OTHER; note = 2'-O-methyl modified nucleotide
  modified_base 30: mod_base = OTHER; note = 2'-O-methyl modified nucleotide
  modified_base 31: mod_base = OTHER; note = 2'-O-methyl modified nucleotide
  modified_base 32: mod_base = OTHER; note = 2'-O-methyl modified nucleotide
  modified_base 33: mod_base = OTHER; note = 2'-O-methyl modified nucleotide
  modified_base 34: mod_base = OTHER; note = 2'-O-methyl modified nucleotide
  modified_base 35: mod_base = OTHER; note = 2'-O-methyl modified nucleotide
  modified_base 36: mod_base = OTHER; note = 2'-O-methyl modified nucleotide
  modified_base 37: mod_base = OTHER; note = 2'-O-methyl modified nucleotide
  modified_base 38: mod_base = OTHER; note = 2'-O-methyl modified nucleotide
  modified_base 39: mod_base = OTHER; note = 2'-O-methyl modified nucleotide
  modified_base 40: mod_base = OTHER; note = 2'-O-methyl modified nucleotide
  modified_base 69: mod_base = OTHER; note = 2'-O-methyl modified nucleotide
  modified_base 70: mod_base = OTHER; note = 2'-O-methyl modified nucleotide
  modified_base 71: mod_base = OTHER; note = 2'-O-methyl modified nucleotide
  modified_base 72: mod_base = OTHER; note = 2'-O-methyl modified nucleotide
  modified_base 73: mod_base = OTHER; note = 2'-O-methyl modified nucleotide
  modified_base 74: mod_base = OTHER; note = 2'-O-methyl modified nucleotide
  modified_base 75: mod_base = OTHER; note = 2'-O-methyl modified nucleotide
  modified_base 76: mod_base = OTHER; note = 2'-O-methyl modified nucleotide
  modified_base 77: mod_base = OTHER; note = 2'-O-methyl modified nucleotide
  modified_base 78: mod_base = OTHER; note = 2'-O-methyl modified nucleotide
  modified_base 79: mod_base = OTHER; note = 2'-O-methyl modified nucleotide
  modified_base 80: mod_base = OTHER; note = 2'-O-methyl modified nucleotide
  modified_base 81: mod_base = OTHER; note = 2'-O-methyl modified nucleotide
  modified_base 82: mod_base = OTHER; note = 2'-O-methyl modified nucleotide
  modified_base 83: mod_base = OTHER; note = 2'-O-methyl modified nucleotide
  modified_base 84: mod_base = OTHER; note = 2'-O-methyl modified nucleotide
  modified_base 85: mod_base = OTHER; note = 2'-O-methyl modified nucleotide
  modified_base 86: mod_base = OTHER; note = 2'-O-methyl modified nucleotide
  modified_base 87: mod_base = OTHER; note = 2'-O-methyl modified nucleotide
  modified_base 88: mod_base = OTHER; note = 2'-O-methyl modified nucleotide
  modified_base 89: mod_base = OTHER; note = 2'-O-methyl modified nucleotide
  modified_base 90: mod_base = OTHER; note = 2'-O-methyl modified nucleotide
  modified_base 91: mod_base = OTHER; note = 2'-O-methyl modified nucleotide
  modified_base 92: mod_base = OTHER; note = 2'-O-methyl modified nucleotide
  modified_base 93: mod_base = OTHER; note = 2'-O-methyl modified nucleotide
  modified_base 94: mod_base = OTHER; note = 2'-O-methyl modified nucleotide
  modified_base 95: mod_base = OTHER; note = 2'-O-methyl modified nucleotide
  modified_base 96: mod_base = OTHER; note = 2'-O-methyl modified nucleotide
  modified_base 117: mod_base = OTHER; note = Nucleotide with phosphorothioate linkage
  modified_base 118: mod_base = OTHER; note = 2'-O-methyl modified nucleotide with phosphorothioate linkage
  modified_base 119: mod_base = OTHER; note = 2'-O-methyl modified nucleotide with phosphorothioate linkage
  modified_base 120: mod_base = OTHER; note = 2'-O-methyl modified nucleotide
gctggtacacggcagggtcagttttagagctagaaatagcaagttaaaataaggctagtccgttatcaacttgaaaaagtggcaccgagtcggtgcaaccctagttgatgaccctgccgt

SEQ ID NO: 16636 - RNA, 119 nt, synthetic construct
  source 1..119: mol_type = other RNA
  modified_base 1: mod_base = OTHER; note = 2'-O-methyl modified nucleotide with phosphorothioate linkage
  modified_base 2: mod_base = OTHER; note = 2'-O-methyl modified nucleotide with phosphorothioate linkage
  modified_base 3: mod_base = OTHER; note = 2'-O-methyl modified nucleotide with phosphorothioate linkage
  modified_base 29: mod_base = OTHER; note = 2'-O-methyl modified nucleotide
  modified_base 30: mod_base = OTHER; note = 2'-O-methyl modified nucleotide
  modified_base 31: mod_base = OTHER; note = 2'-O-methyl modified nucleotide
  modified_base 32: mod_base = OTHER; note = 2'-O-methyl modified nucleotide
  modified_base 33: mod_base = OTHER; note = 2'-O-methyl modified nucleotide
  modified_base 34: mod_base = OTHER; note = 2'-O-methyl modified nucleotide
  modified_base 35: mod_base = OTHER; note = 2'-O-methyl modified nucleotide
  modified_base 36: mod_base = OTHER; note = 2'-O-methyl modified nucleotide
  modified_base 37: mod_base = OTHER; note = 2'-O-methyl modified nucleotide
  modified_base 38: mod_base = OTHER; note = 2'-O-methyl modified nucleotide
  modified_base 39: mod_base = OTHER; note = 2'-O-methyl modified nucleotide
  modified_base 40: mod_base = OTHER; note = 2'-O-methyl modified nucleotide
  modified_base 69: mod_base = OTHER; note = 2'-O-methyl modified nucleotide
  modified_base 70: mod_base = OTHER; note = 2'-O-methyl modified nucleotide
  modified_base 71: mod_base = OTHER; note = 2'-O-methyl modified nucleotide
  modified_base 72: mod_base = OTHER; note = 2'-O-methyl modified nucleotide
  modified_base 73: mod_base = OTHER; note = 2'-O-methyl modified nucleotide
  modified_base 74: mod_base = OTHER; note = 2'-O-methyl modified nucleotide
  modified_base 75: mod_base = OTHER; note = 2'-O-methyl modified nucleotide
  modified_base 76: mod_base = OTHER; note = 2'-O-methyl modified nucleotide
  modified_base 77: mod_base = OTHER; note = 2'-O-methyl modified nucleotide
  modified_base 78: mod_base = OTHER; note = 2'-O-methyl modified nucleotide
  modified_base 79: mod_base = OTHER; note = 2'-O-methyl modified nucleotide
  modified_base 80: mod_base = OTHER; note = 2'-O-methyl modified nucleotide
  modified_base 81: mod_base = OTHER; note = 2'-O-methyl modified nucleotide
  modified_base 82: mod_base = OTHER; note = 2'-O-methyl modified nucleotide
  modified_base 83: mod_base = OTHER; note = 2'-O-methyl modified nucleotide
  modified_base 84: mod_base = OTHER; note = 2'-O-methyl modified nucleotide
  modified_base 85: mod_base = OTHER; note = 2'-O-methyl modified nucleotide
  modified_base 86: mod_base = OTHER; note = 2'-O-methyl modified nucleotide
  modified_base 87: mod_base = OTHER; note = 2'-O-methyl modified nucleotide
  modified_base 88: mod_base = OTHER; note = 2'-O-methyl modified nucleotide
  modified_base 89: mod_base = OTHER; note = 2'-O-methyl modified nucleotide
  modified_base 90: mod_base = OTHER; note = 2'-O-methyl modified nucleotide
  modified_base 91: mod_base = OTHER; note = 2'-O-methyl modified nucleotide
  modified_base 92: mod_base = OTHER; note = 2'-O-methyl modified nucleotide
  modified_base 93: mod_base = OTHER; note = 2'-O-methyl modified nucleotide
  modified_base 94: mod_base = OTHER; note = 2'-O-methyl modified nucleotide
  modified_base 95: mod_base = OTHER; note = 2'-O-methyl modified nucleotide
  modified_base 96: mod_base = OTHER; note = 2'-O-methyl modified nucleotide
  modified_base 116: mod_base = OTHER; note = Nucleotide with phosphorothioate linkage
  modified_base 117: mod_base = OTHER; note = 2'-O-methyl modified nucleotide with phosphorothioate linkage
  modified_base 118: mod_base = OTHER; note = 2'-O-methyl modified nucleotide with phosphorothioate linkage
  modified_base 119: mod_base = OTHER; note = 2'-O-methyl modified nucleotide
gctggtacacggcagggtcagttttagagctagaaatagcaagttaaaataaggctagtccgttatcaacttgaaaaagtggcaccgagtcggtgcaaccctagttgatgaccctgccg

SEQ ID NO: 16637 - RNA, 126 nt, synthetic construct
  source 1..126: mol_type = other RNA
  modified_base 1: mod_base = OTHER; note = 2'-O-methyl modified nucleotide with phosphorothioate linkage
  modified_base 2: mod_base = OTHER; note = 2'-O-methyl modified nucleotide with phosphorothioate linkage
  modified_base 3: mod_base = OTHER; note = 2'-O-methyl modified nucleotide with phosphorothioate linkage
  modified_base 29: mod_base = OTHER; note = 2'-O-methyl modified nucleotide
  modified_base 30: mod_base = OTHER; note = 2'-O-methyl modified nucleotide
  modified_base 31: mod_base = OTHER; note = 2'-O-methyl modified nucleotide
  modified_base 32: mod_base = OTHER; note = 2'-O-methyl modified nucleotide
  modified_base 33: mod_base = OTHER; note = 2'-O-methyl modified nucleotide
  modified_base 34: mod_base = OTHER; note = 2'-O-methyl modified nucleotide
  modified_base 35: mod_base = OTHER; note = 2'-O-methyl modified nucleotide
  modified_base 36: mod_base = OTHER; note = 2'-O-methyl modified nucleotide
  modified_base 37: mod_base = OTHER; note = 2'-O-methyl modified nucleotide
  modified_base 38: mod_base = OTHER; note = 2'-O-methyl modified nucleotide
  modified_base 39: mod_base = OTHER; note = 2'-O-methyl modified nucleotide
  modified_base 40: mod_base = OTHER; note = 2'-O-methyl modified nucleotide
  modified_base 69: mod_base = OTHER; note = 2'-O-methyl modified nucleotide
  modified_base 70: mod_base = OTHER; note = 2'-O-methyl modified nucleotide
  modified_base 71: mod_base = OTHER; note = 2'-O-methyl modified nucleotide
  modified_base 72: mod_base = OTHER; note = 2'-O-methyl modified nucleotide
  modified_base 73: mod_base = OTHER; note = 2'-O-methyl modified nucleotide
  modified_base 74: mod_base = OTHER; note = 2'-O-methyl modified nucleotide
  modified_base 75: mod_base = OTHER; note = 2'-O-methyl modified nucleotide
  modified_base 76: mod_base = OTHER; note = 2'-O-methyl modified nucleotide
  modified_base 77: mod_base = OTHER; note = 2'-O-methyl modified nucleotide
  modified_base 78: mod_base = OTHER; note = 2'-O-methyl modified nucleotide
  modified_base 79: mod_base = OTHER; note = 2'-O-methyl modified nucleotide
  modified_base 80: mod_base = OTHER; note = 2'-O-methyl modified nucleotide
  modified_base 81: mod_base = OTHER; note = 2'-O-methyl modified nucleotide
  modified_base 82: mod_base = OTHER; note = 2'-O-methyl modified nucleotide
  modified_base 83: mod_base = OTHER; note = 2'-O-methyl modified nucleotide
  modified_base 84: mod_base = OTHER; note = 2'-O-methyl modified nucleotide
  modified_base 85: mod_base = OTHER; note = 2'-O-methyl modified nucleotide
  modified_base 86: mod_base = OTHER; note = 2'-O-methyl modified nucleotide
  modified_base 87: mod_base = OTHER; note = 2'-O-methyl modified nucleotide
  modified_base 88: mod_base = OTHER; note = 2'-O-methyl modified nucleotide
  modified_base 89: mod_base = OTHER; note = 2'-O-methyl modified nucleotide
  modified_base 90: mod_base = OTHER; note = 2'-O-methyl modified nucleotide
  modified_base 91: mod_base = OTHER; note = 2'-O-methyl modified nucleotide
  modified_base 92: mod_base = OTHER; note = 2'-O-methyl modified nucleotide
  modified_base 93: mod_base = OTHER; note = 2'-O-methyl modified nucleotide
  modified_base 94: mod_base = OTHER; note = 2'-O-methyl modified nucleotide
  modified_base 95: mod_base = OTHER; note = 2'-O-methyl modified nucleotide
  modified_base 96: mod_base = OTHER; note = 2'-O-methyl modified nucleotide
  modified_base 123: mod_base = OTHER; note = Nucleotide with phosphorothioate linkage
  modified_base 124: mod_base = OTHER; note = 2'-O-methyl modified nucleotide with phosphorothioate linkage
  modified_base 125: mod_base = OTHER; note = 2'-O-methyl modified nucleotide with phosphorothioate linkage
  modified_base 126: mod_base = OTHER; note = 2'-O-methyl modified nucleotide
gctggtacacggcagggtcagttttagagctagaaatagcaagttaaaataaggctagtccgttatcaacttgaaaaagtggcaccgagtcggtgcagaaccctagttgatgaccctgccgtgtac

SEQ ID NO: 16638 - RNA, 125 nt, synthetic construct
  source 1..125: mol_type = other RNA
  modified_base 1: mod_base = OTHER; note = 2'-O-methyl modified nucleotide with phosphorothioate linkage
  modified_base 2: mod_base = OTHER; note = 2'-O-methyl modified nucleotide with phosphorothioate linkage
  modified_base 3: mod_base = OTHER; note = 2'-O-methyl modified nucleotide with phosphorothioate linkage
  modified_base 29: mod_base = OTHER; note = 2'-O-methyl modified nucleotide
  modified_base 30: mod_base = OTHER; note = 2'-O-methyl modified nucleotide
  modified_base 31: mod_base = OTHER; note = 2'-O-methyl modified nucleotide
  modified_base 32: mod_base = OTHER; note = 2'-O-methyl modified nucleotide
  modified_base 33: mod_base = OTHER; note = 2'-O-methyl modified nucleotide
  modified_base 34: mod_base = OTHER; note = 2'-O-methyl modified nucleotide
  modified_base 35: mod_base = OTHER; note = 2'-O-methyl modified nucleotide
  modified_base 36: mod_base = OTHER; note = 2'-O-methyl modified nucleotide
  modified_base 37: mod_base = OTHER; note = 2'-O-methyl modified nucleotide
  modified_base 38: mod_base = OTHER; note = 2'-O-methyl modified nucleotide
  modified_base 39: mod_base = OTHER; note = 2'-O-methyl modified nucleotide
  modified_base 40: mod_base = OTHER; note = 2'-O-methyl modified nucleotide
  modified_base 69: mod_base = OTHER; note = 2'-O-methyl modified nucleotide
  modified_base 70: mod_base = OTHER; note = 2'-O-methyl modified nucleotide
  modified_base 71: mod_base = OTHER; note = 2'-O-methyl modified nucleotide
  modified_base 72: mod_base = OTHER; note = 2'-O-methyl modified nucleotide
  modified_base 73: mod_base = OTHER; note = 2'-O-methyl modified nucleotide
  modified_base 74: mod_base = OTHER; note = 2'-O-methyl modified nucleotide
  modified_base 75: mod_base = OTHER; note = 2'-O-methyl modified nucleotide
  modified_base 76: mod_base = OTHER; note = 2'-O-methyl modified nucleotide
  modified_base 77: mod_base = OTHER; note = 2'-O-methyl modified nucleotide
  modified_base 78: mod_base = OTHER; note = 2'-O-methyl modified nucleotide
  modified_base 79: mod_base = OTHER; note = 2'-O-methyl modified nucleotide
  modified_base 80: mod_base = OTHER; note = 2'-O-methyl modified nucleotide
  modified_base 81: mod_base = OTHER; note = 2'-O-methyl modified nucleotide
  modified_base 82: mod_base = OTHER; note = 2'-O-methyl modified nucleotide
  modified_base 83: mod_base = OTHER; note = 2'-O-methyl modified nucleotide
  modified_base 84: mod_base = OTHER; note = 2'-O-methyl modified nucleotide
  modified_base 85: mod_base = OTHER; note = 2'-O-methyl modified nucleotide
  modified_base 86: mod_base = OTHER; note = 2'-O-methyl modified nucleotide
  modified_base 87: mod_base = OTHER; note = 2'-O-methyl modified nucleotide
  modified_base 88: mod_base = OTHER; note = 2'-O-methyl modified nucleotide
  modified_base 89: mod_base = OTHER; note = 2'-O-methyl modified nucleotide
  modified_base 90: mod_base = OTHER; note = 2'-O-methyl modified nucleotide
  modified_base 91: mod_base = OTHER; note = 2'-O-methyl modified nucleotide
  modified_base 92: mod_base = OTHER; note = 2'-O-methyl modified nucleotide
  modified_base 93: mod_base = OTHER; note = 2'-O-methyl modified nucleotide
  modified_base 94: mod_base = OTHER; note = 2'-O-methyl modified nucleotide
  modified_base 95: mod_base = OTHER; note = 2'-O-methyl modified nucleotide
  modified_base 96: mod_base = OTHER; note = 2'-O-methyl modified nucleotide
  modified_base 122: mod_base = OTHER; note = Nucleotide with phosphorothioate linkage
  modified_base 123: mod_base = OTHER; note = 2'-O-methyl modified nucleotide with phosphorothioate linkage
  modified_base 124: mod_base = OTHER; note = 2'-O-methyl modified nucleotide with phosphorothioate linkage
  modified_base 125: mod_base = OTHER; note = 2'-O-methyl modified nucleotide
gctggtacacggcagggtcagttttagagctagaaatagcaagttaaaataaggctagtccgttatcaacttgaaaaagtggcaccgagtcggtgcagaaccctagttgatgaccctgccgtgta

SEQ ID NO: 16639 - RNA, 124 nt, synthetic construct
  source 1..124: mol_type = other RNA
  modified_base 1: mod_base = OTHER; note = 2'-O-methyl modified nucleotide with phosphorothioate linkage
  modified_base 2: mod_base = OTHER; note = 2'-O-methyl modified nucleotide with phosphorothioate linkage
  modified_base 3: mod_base = OTHER; note = 2'-O-methyl modified nucleotide with phosphorothioate linkage
  modified_base 29: mod_base = OTHER; note = 2'-O-methyl modified nucleotide
  modified_base 30: mod_base = OTHER; note = 2'-O-methyl modified nucleotide
  modified_base 31: mod_base = OTHER; note = 2'-O-methyl modified nucleotide
  modified_base 32: mod_base = OTHER; note = 2'-O-methyl modified nucleotide
  modified_base 33: mod_base = OTHER; note = 2'-O-methyl modified nucleotide
  modified_base 34: mod_base = OTHER; note = 2'-O-methyl modified nucleotide
  modified_base 35: mod_base = OTHER; note = 2'-O-methyl modified nucleotide
  modified_base 36: mod_base = OTHER; note = 2'-O-methyl modified nucleotide
  modified_base 37: mod_base = OTHER; note = 2'-O-methyl modified nucleotide
  modified_base 38: mod_base = OTHER; note = 2'-O-methyl modified nucleotide
  modified_base 39: mod_base = OTHER; note = 2'-O-methyl modified nucleotide
  modified_base 40: mod_base = OTHER; note = 2'-O-methyl modified nucleotide
  modified_base 69: mod_base = OTHER; note = 2'-O-methyl modified nucleotide
  modified_base 70: mod_base = OTHER; note = 2'-O-methyl modified nucleotide
  modified_base 71: mod_base = OTHER; note = 2'-O-methyl modified nucleotide
  modified_base 72: mod_base = OTHER; note = 2'-O-methyl modified nucleotide
  modified_base 73: mod_base = OTHER; note = 2'-O-methyl modified nucleotide
  modified_base 74: mod_base = OTHER; note = 2'-O-methyl modified nucleotide
  modified_base 75: mod_base = OTHER; note = 2'-O-methyl modified nucleotide
  modified_base 76: mod_base = OTHER; note = 2'-O-methyl modified nucleotide
  modified_base 77: mod_base = OTHER; note = 2'-O-methyl modified nucleotide
  modified_base 78: mod_base = OTHER; note = 2'-O-methyl modified nucleotide
  modified_base 79: mod_base = OTHER; note = 2'-O-methyl modified nucleotide
  modified_base 80: mod_base = OTHER; note = 2'-O-methyl modified nucleotide
  modified_base 81: mod_base = OTHER; note = 2'-O-methyl modified nucleotide
  modified_base 82: mod_base = OTHER; note = 2'-O-methyl modified nucleotide
  modified_base 83: mod_base = OTHER; note = 2'-O-methyl modified nucleotide
  modified_base 84: mod_base = OTHER; note = 2'-O-methyl modified nucleotide
  modified_base 85: mod_base = OTHER; note = 2'-O-methyl modified nucleotide
  modified_base 86: mod_base = OTHER; note = 2'-O-methyl modified nucleotide
  modified_base 87: mod_base = OTHER; note = 2'-O-methyl modified nucleotide
  modified_base 88: mod_base = OTHER; note = 2'-O-methyl modified nucleotide
  modified_base 89: mod_base = OTHER; note = 2'-O-methyl modified nucleotide
  modified_base 90: mod_base = OTHER; note = 2'-O-methyl modified nucleotide
  modified_base 91: mod_base = OTHER; note = 2'-O-methyl modified nucleotide
  modified_base 92: mod_base = OTHER; note = 2'-O-methyl modified nucleotide
  modified_base 93: mod_base = OTHER; note = 2'-O-methyl modified nucleotide
  modified_base 94: mod_base = OTHER; note = 2'-O-methyl modified nucleotide
  modified_base 95: mod_base = OTHER; note = 2'-O-methyl modified nucleotide
  modified_base 96: mod_base = OTHER; note = 2'-O-methyl modified nucleotide
  modified_base 121: mod_base = OTHER; note = Nucleotide with phosphorothioate linkage
  modified_base 122: mod_base = OTHER; note = 2'-O-methyl modified nucleotide with phosphorothioate linkage
  modified_base 123: mod_base = OTHER; note = 2'-O-methyl modified nucleotide with phosphorothioate linkage
  modified_base 124: mod_base = OTHER; note = 2'-O-methyl modified nucleotide
gctggtacacggcagggtcagttttagagctagaaatagcaagttaaaataaggctagtccgttatcaacttgaaaaagtggcaccgagtcggtgcagaaccctagttgatgaccctgccgtgt

SEQ ID NO: 16640 - RNA, 123 nt, synthetic construct
  source 1..123: mol_type = other RNA
  modified_base 1: mod_base = OTHER; note = 2'-O-methyl modified nucleotide with phosphorothioate linkage
  modified_base 2: mod_base = OTHER; note = 2'-O-methyl modified nucleotide with phosphorothioate linkage
  modified_base 3: mod_base = OTHER; note = 2'-O-methyl modified nucleotide with phosphorothioate linkage
  modified_base 29: mod_base = OTHER; note = 2'-O-methyl modified nucleotide
  modified_base 30: mod_base = OTHER; note = 2'-O-methyl modified nucleotide
  modified_base 31: mod_base = OTHER; note = 2'-O-methyl modified nucleotide
  modified_base 32: mod_base = OTHER; note = 2'-O-methyl modified nucleotide
  modified_base 33: mod_base = OTHER; note = 2'-O-methyl modified nucleotide
  modified_base 34: mod_base = OTHER; note = 2'-O-methyl modified nucleotide
  modified_base 35: mod_base = OTHER; note = 2'-O-methyl modified nucleotide
  modified_base 36: mod_base = OTHER; note = 2'-O-methyl modified nucleotide
  modified_base 37: mod_base = OTHER; note = 2'-O-methyl modified nucleotide
  modified_base 38: mod_base = OTHER; note = 2'-O-methyl modified nucleotide
  modified_base 39: mod_base = OTHER; note = 2'-O-methyl modified nucleotide
  modified_base 40: mod_base = OTHER; note = 2'-O-methyl modified nucleotide
  modified_base 69: mod_base = OTHER; note = 2'-O-methyl modified nucleotide
  modified_base 70: mod_base = OTHER; note = 2'-O-methyl modified nucleotide
  modified_base 71: mod_base = OTHER; note = 2'-O-methyl modified nucleotide
  modified_base 72: mod_base = OTHER; note = 2'-O-methyl modified nucleotide
  modified_base 73: mod_base = OTHER; note = 2'-O-methyl modified nucleotide
  modified_base 74: mod_base = OTHER; note = 2'-O-methyl modified nucleotide
  modified_base 75: mod_base = OTHER; note = 2'-O-methyl modified nucleotide
  modified_base 76: mod_base = OTHER; note = 2'-O-methyl modified nucleotide
  modified_base 77: mod_base = OTHER; note = 2'-O-methyl modified nucleotide
  modified_base 78: mod_base = OTHER; note = 2'-O-methyl modified nucleotide
  modified_base 79: mod_base = OTHER; note = 2'-O-methyl modified nucleotide
  modified_base 80: mod_base = OTHER; note = 2'-O-methyl modified nucleotide
  modified_base 81: mod_base = OTHER; note = 2'-O-methyl modified nucleotide
  modified_base 82: mod_base = OTHER; note = 2'-O-methyl modified nucleotide
  modified_base 83: mod_base = OTHER; note = 2'-O-methyl modified nucleotide
  modified_base 84: mod_base = OTHER; note = 2'-O-methyl modified nucleotide
  modified_base 85: mod_base = OTHER; note = 2'-O-methyl modified nucleotide
  modified_base 86: mod_base = OTHER; note = 2'-O-methyl modified nucleotide
  modified_base 87: mod_base = OTHER; note = 2'-O-methyl modified nucleotide
  modified_base 88: mod_base = OTHER; note = 2'-O-methyl modified nucleotide
  modified_base 89: mod_base = OTHER; note = 2'-O-methyl modified nucleotide
  modified_base 90: mod_base = OTHER; note = 2'-O-methyl modified nucleotide
  modified_base 91: mod_base = OTHER; note = 2'-O-methyl modified nucleotide
  modified_base 92: mod_base = OTHER; note = 2'-O-methyl modified nucleotide
  modified_base 93: mod_base = OTHER; note = 2'-O-methyl modified nucleotide
  modified_base 94: mod_base = OTHER; note = 2'-O-methyl modified nucleotide
  modified_base 95: mod_base = OTHER; note = 2'-O-methyl modified nucleotide
  modified_base 96: mod_base = OTHER; note = 2'-O-methyl modified nucleotide
  modified_base 120: mod_base = OTHER; note = Nucleotide with phosphorothioate linkage
  modified_base 121: mod_base = OTHER; note = 2'-O-methyl modified nucleotide with phosphorothioate linkage
  modified_base 122: mod_base = OTHER; note = 2'-O-methyl modified nucleotide with phosphorothioate linkage
  modified_base 123: mod_base = OTHER; note = 2'-O-methyl modified nucleotide
gctggtacacggcagggtcagttttagagctagaaatagcaagttaaaataaggctagtccgttatcaacttgaaaaagtggcaccgagtcggtgcagaaccctagttgatgaccctgccgtg

SEQ ID NO: 16641 - RNA, 122 nt, synthetic construct
  source 1..122: mol_type = other RNA
  modified_base 1: mod_base = OTHER; note = 2'-O-methyl modified nucleotide with phosphorothioate linkage
  modified_base 2: mod_base = OTHER; note = 2'-O-methyl modified nucleotide with phosphorothioate linkage
  modified_base 3: mod_base = OTHER; note = 2'-O-methyl modified nucleotide with phosphorothioate linkage
  modified_base 29: mod_base = OTHER; note = 2'-O-methyl modified nucleotide
  modified_base 30: mod_base = OTHER; note = 2'-O-methyl modified nucleotide
  modified_base 31: mod_base = OTHER; note = 2'-O-methyl modified nucleotide
  modified_base 32: mod_base = OTHER; note = 2'-O-methyl modified nucleotide
  modified_base 33: mod_base = OTHER; note = 2'-O-methyl modified nucleotide
  modified_base 34: mod_base = OTHER; note = 2'-O-methyl modified nucleotide
  modified_base 35: mod_base = OTHER; note = 2'-O-methyl modified nucleotide
  modified_base 36: mod_base = OTHER; note = 2'-O-methyl modified nucleotide
  modified_base 37: mod_base = OTHER; note = 2'-O-methyl modified nucleotide
  modified_base 38: mod_base = OTHER; note = 2'-O-methyl modified nucleotide
  modified_base 39: mod_base = OTHER; note = 2'-O-methyl modified nucleotide
  modified_base 40: mod_base = OTHER; note = 2'-O-methyl modified nucleotide
  modified_base 69: mod_base = OTHER; note = 2'-O-methyl modified nucleotide
  modified_base 70: mod_base = OTHER; note = 2'-O-methyl modified nucleotide
  modified_base 71: mod_base = OTHER; note = 2'-O-methyl modified nucleotide
  modified_base 72: mod_base = OTHER; note = 2'-O-methyl modified nucleotide
  modified_base 73: mod_base = OTHER; note = 2'-O-methyl modified nucleotide
  modified_base 74: mod_base = OTHER; note = 2'-O-methyl modified nucleotide
  modified_base 75: mod_base = OTHER; note = 2'-O-methyl modified nucleotide
  modified_base 76: mod_base = OTHER; note = 2'-O-methyl modified nucleotide
  modified_base 77: mod_base = OTHER; note = 2'-O-methyl modified nucleotide
  modified_base 78: mod_base = OTHER; note = 2'-O-methyl modified nucleotide
  modified_base 79: mod_base = OTHER; note = 2'-O-methyl modified nucleotide
  modified_base 80: mod_base = OTHER; note = 2'-O-methyl modified nucleotide
  modified_base 81: mod_base = OTHER; note = 2'-O-methyl modified nucleotide
  modified_base 82: mod_base = OTHER; note = 2'-O-methyl modified nucleotide
  modified_base 83: mod_base = OTHER; note = 2'-O-methyl modified nucleotide
  modified_base 84: mod_base = OTHER; note = 2'-O-methyl modified nucleotide
  modified_base 85: mod_base = OTHER; note = 2'-O-methyl modified nucleotide
  modified_base 86: mod_base = OTHER; note = 2'-O-methyl modified nucleotide
  modified_base 87: mod_base = OTHER; note = 2'-O-methyl modified nucleotide
  modified_base 88: mod_base = OTHER; note = 2'-O-methyl modified nucleotide
  modified_base 89: mod_base = OTHER; note = 2'-O-methyl modified nucleotide
  modified_base 90: mod_base = OTHER; note = 2'-O-methyl modified nucleotide
  modified_base 91: mod_base = OTHER; note = 2'-O-methyl modified nucleotide
  modified_base 92: mod_base = OTHER; note = 2'-O-methyl modified nucleotide
  modified_base 93: mod_base = OTHER; note = 2'-O-methyl modified nucleotide
  modified_base 94: mod_base = OTHER; note = 2'-O-methyl modified nucleotide
  modified_base 95: mod_base = OTHER; note = 2'-O-methyl modified nucleotide
  modified_base 96: mod_base = OTHER; note = 2'-O-methyl modified nucleotide
  modified_base 119: mod_base = OTHER; note = Nucleotide with phosphorothioate linkage
  modified_base 120: mod_base = OTHER; note = 2'-O-methyl modified nucleotide with phosphorothioate linkage
  modified_base 121: mod_base = OTHER; note = 2'-O-methyl modified nucleotide with phosphorothioate linkage
  modified_base 122: mod_base = OTHER; note = 2'-O-methyl modified nucleotide
gctggtacacggcagggtcagttttagagctagaaatagcaagttaaaataaggctagtccgttatcaacttgaaaaagtggcaccgagtcggtgcagaaccctagttgatgaccctgccgt

SEQ ID NO: 16642 - RNA, 121 nt, synthetic construct
  source 1..121: mol_type = other RNA
  modified_base 1: mod_base = OTHER; note = 2'-O-methyl modified nucleotide with phosphorothioate linkage
  modified_base 2: mod_base = OTHER; note = 2'-O-methyl modified nucleotide with phosphorothioate linkage
  modified_base 3: mod_base = OTHER; note = 2'-O-methyl modified nucleotide with phosphorothioate linkage
  modified_base 29: mod_base = OTHER; note = 2'-O-methyl modified nucleotide
  modified_base 30: mod_base = OTHER; note = 2'-O-methyl modified nucleotide
  modified_base 31: mod_base = OTHER; note = 2'-O-methyl modified nucleotide
  modified_base 32: mod_base = OTHER; note = 2'-O-methyl modified nucleotide
  modified_base 33: mod_base = OTHER; note = 2'-O-methyl modified nucleotide
  modified_base 34: mod_base = OTHER; note = 2'-O-methyl modified nucleotide
  modified_base 35: mod_base = OTHER; note = 2'-O-methyl modified nucleotide
  modified_base 36: mod_base = OTHER; note = 2'-O-methyl modified nucleotide
  modified_base 37: mod_base = OTHER; note = 2'-O-methyl modified nucleotide
  modified_base 38: mod_base = OTHER; note = 2'-O-methyl modified nucleotide
  modified_base 39: mod_base = OTHER; note = 2'-O-methyl modified nucleotide
  modified_base 40: mod_base = OTHER; note = 2'-O-methyl modified nucleotide
  modified_base 69: mod_base = OTHER; note = 2'-O-methyl modified nucleotide
  modified_base 70: mod_base = OTHER; note = 2'-O-methyl modified nucleotide
  modified_base 71: mod_base = OTHER; note = 2'-O-methyl modified nucleotide
  modified_base 72: mod_base = OTHER; note = 2'-O-methyl modified nucleotide
  modified_base 73: mod_base = OTHER; note = 2'-O-methyl modified nucleotide
  modified_base 74: mod_base = OTHER; note = 2'-O-methyl modified nucleotide
  modified_base 75: mod_base = OTHER; note = 2'-O-methyl modified nucleotide
  modified_base 76: mod_base = OTHER; note = 2'-O-methyl modified nucleotide
  modified_base 77: mod_base = OTHER; note = 2'-O-methyl modified nucleotide
  modified_base 78: mod_base = OTHER; note = 2'-O-methyl modified nucleotide
  modified_base 79: mod_base = OTHER; note = 2'-O-methyl modified nucleotide
  modified_base 80: mod_base = OTHER; note = 2'-O-methyl modified nucleotide
  modified_base 81: mod_base = OTHER; note = 2'-O-methyl modified nucleotide
  modified_base 82: mod_base = OTHER; note = 2'-O-methyl modified nucleotide
  modified_base 83: mod_base = OTHER; note = 2'-O-methyl modified nucleotide
  modified_base 84: mod_base = OTHER; note = 2'-O-methyl modified nucleotide
  modified_base 85: mod_base = OTHER; note = 2'-O-methyl modified nucleotide
  modified_base 86: mod_base = OTHER; note = 2'-O-methyl modified nucleotide
  modified_base 87: mod_base = OTHER; note = 2'-O-methyl modified nucleotide
  modified_base 88: mod_base = OTHER; note = 2'-O-methyl modified nucleotide
  modified_base 89: mod_base = OTHER; note = 2'-O-methyl modified nucleotide
  modified_base 90: mod_base = OTHER; note = 2'-O-methyl modified nucleotide
  modified_base 91: mod_base = OTHER; note = 2'-O-methyl modified nucleotide
  modified_base 92: mod_base = OTHER; note = 2'-O-methyl modified nucleotide
  modified_base 93: mod_base = OTHER; note = 2'-O-methyl modified nucleotide
  modified_base 94: mod_base = OTHER; note = 2'-O-methyl modified nucleotide
  modified_base 95: mod_base = OTHER; note = 2'-O-methyl modified nucleotide
  modified_base 96: mod_base = OTHER; note = 2'-O-methyl modified nucleotide
  modified_base 118: mod_base = OTHER; note = Nucleotide with phosphorothioate linkage
  modified_base 119: mod_base = OTHER; note = 2'-O-methyl modified nucleotide with phosphorothioate linkage
  modified_base 120: mod_base = OTHER; note = 2'-O-methyl modified nucleotide with phosphorothioate linkage
  modified_base 121: mod_base = OTHER; note = 2'-O-methyl modified nucleotide
gctggtacacggcagggtcagttttagagctagaaatagcaagttaaaataaggctagtccgttatcaacttgaaaaagtggcaccgagtcggtgcagaaccctagttgatgaccctgccg

SEQ ID NO: 16643 - RNA, 128 nt, synthetic construct
  source 1..128: mol_type = other RNA
  modified_base 1: mod_base = OTHER; note = 2'-O-methyl modified nucleotide with phosphorothioate linkage
  modified_base 2: mod_base = OTHER; note = 2'-O-methyl modified nucleotide with phosphorothioate linkage
  modified_base 3: mod_base = OTHER; note = 2'-O-methyl modified nucleotide with phosphorothioate linkage
  modified_base 29: mod_base = OTHER; note = 2'-O-methyl modified nucleotide
  modified_base 30: mod_base = OTHER; note = 2'-O-methyl modified nucleotide
  modified_base 31: mod_base = OTHER; note = 2'-O-methyl modified nucleotide
  modified_base 32: mod_base = OTHER; note = 2'-O-methyl modified nucleotide
  modified_base 33: mod_base = OTHER; note = 2'-O-methyl modified nucleotide
  modified_base 34: mod_base = OTHER; note = 2'-O-methyl modified nucleotide
  modified_base 35: mod_base = OTHER; note = 2'-O-methyl modified nucleotide
  modified_base 36: mod_base = OTHER; note = 2'-O-methyl modified nucleotide
  modified_base 37: mod_base = OTHER; note = 2'-O-methyl modified nucleotide
  modified_base 38: mod_base = OTHER; note = 2'-O-methyl modified nucleotide
  modified_base 39: mod_base = OTHER; note = 2'-O-methyl modified nucleotide
  modified_base 40: mod_base = OTHER; note = 2'-O-methyl modified nucleotide
  modified_base 69: mod_base = OTHER; note = 2'-O-methyl modified nucleotide
  modified_base 70: mod_base = OTHER; note = 2'-O-methyl modified nucleotide
  modified_base 71: mod_base = OTHER; note = 2'-O-methyl modified nucleotide
  modified_base 72: mod_base = OTHER; note = 2'-O-methyl modified nucleotide
  modified_base 73: mod_base = OTHER; note = 2'-O-methyl modified nucleotide
  modified_base 74: mod_base = OTHER; note = 2'-O-methyl modified nucleotide
  modified_base 75: mod_base = OTHER; note = 2'-O-methyl modified nucleotide
  modified_base 76: mod_base = OTHER; note = 2'-O-methyl modified nucleotide
  modified_base 77: mod_base = OTHER; note = 2'-O-methyl modified nucleotide
  modified_base 78: mod_base = OTHER; note = 2'-O-methyl modified nucleotide
  modified_base 79: mod_base = OTHER; note = 2'-O-methyl modified nucleotide
  modified_base 80: mod_base = OTHER; note = 2'-O-methyl modified nucleotide
  modified_base 81: mod_base = OTHER; note = 2'-O-methyl modified nucleotide
  modified_base 82: mod_base = OTHER; note = 2'-O-methyl modified nucleotide
  modified_base 83: mod_base = OTHER; note = 2'-O-methyl modified nucleotide
  modified_base 84: mod_base = OTHER; note = 2'-O-methyl modified nucleotide
  modified_base 85: mod_base = OTHER; note = 2'-O-methyl modified nucleotide
  modified_base 86: mod_base = OTHER; note = 2'-O-methyl modified nucleotide
  modified_base 87: mod_base = OTHER; note = 2'-O-methyl modified nucleotide
  modified_base 88: mod_base = OTHER; note = 2'-O-methyl modified nucleotide
  modified_base 89: mod_base = OTHER; note = 2'-O-methyl modified nucleotide
  modified_base 90: mod_base = OTHER; note = 2'-O-methyl modified nucleotide
  modified_base 91: mod_base = OTHER; note = 2'-O-methyl modified nucleotide
  modified_base 92: mod_base = OTHER; note = 2'-O-methyl modified nucleotide
  modified_base 93: mod_base = OTHER; note = 2'-O-methyl modified nucleotide
  modified_base 94: mod_base = OTHER; note = 2'-O-methyl modified nucleotide
  modified_base 95: mod_base = OTHER; note = 2'-O-methyl modified nucleotide
  modified_base 96: mod_base = OTHER; note = 2'-O-methyl modified nucleotide
  modified_base 125: mod_base = OTHER; note = Nucleotide with phosphorothioate linkage
  modified_base 126: mod_base = OTHER; note = 2'-O-methyl modified nucleotide with phosphorothioate linkage
  modified_base 127: mod_base = OTHER; note = 2'-O-methyl modified nucleotide with phosphorothioate linkage
  modified_base 128: mod_base = OTHER; note = 2'-O-methyl modified nucleotide
gctggtacacggcagggtcagttttagagctagaaatagcaagttaaaataaggctagtccgttatcaacttgaaaaagtggcaccgagtcggtgcccagaaccctagttgatgaccctgccgtgtac

SEQ ID NO: 16644 - RNA, 127 nt, synthetic construct
  source 1..127: mol_type = other RNA
  modified_base 1: mod_base = OTHER; note = 2'-O-methyl modified nucleotide with phosphorothioate linkage
  modified_base 2: mod_base = OTHER; note = 2'-O-methyl modified nucleotide with phosphorothioate linkage
  modified_base 3: mod_base = OTHER; note = 2'-O-methyl modified nucleotide with phosphorothioate linkage
  modified_base 29: mod_base = OTHER; note = 2'-O-methyl modified nucleotide
  modified_base 30: mod_base = OTHER; note = 2'-O-methyl modified nucleotide
  modified_base 31: mod_base = OTHER; note = 2'-O-methyl modified nucleotide
  modified_base 32: mod_base = OTHER; note = 2'-O-methyl modified nucleotide
  modified_base 33: mod_base = OTHER; note = 2'-O-methyl modified nucleotide
  modified_base 34: mod_base = OTHER; note = 2'-O-methyl modified nucleotide
  modified_base 35: mod_base = OTHER; note = 2'-O-methyl modified nucleotide
  modified_base 36: mod_base = OTHER; note = 2'-O-methyl modified nucleotide
  modified_base 37: mod_base = OTHER; note = 2'-O-methyl modified nucleotide
  modified_base 38: mod_base = OTHER; note = 2'-O-methyl modified nucleotide
  modified_base 39: mod_base = OTHER; note = 2'-O-methyl modified nucleotide
  modified_base 40: mod_base = OTHER; note = 2'-O-methyl modified nucleotide
  modified_base 69: mod_base = OTHER; note = 2'-O-methyl modified nucleotide
  modified_base 70: mod_base = OTHER; note = 2'-O-methyl modified nucleotide
  modified_base 71: mod_base = OTHER; note = 2'-O-methyl modified nucleotide
  modified_base 72: mod_base = OTHER; note = 2'-O-methyl modified nucleotide
  modified_base 73: mod_base = OTHER; note = 2'-O-methyl modified nucleotide
  modified_base 74: mod_base = OTHER; note = 2'-O-methyl modified nucleotide
  modified_base 75: mod_base = OTHER; note = 2'-O-methyl modified nucleotide
  modified_base 76: mod_base = OTHER; note = 2'-O-methyl modified nucleotide
  modified_base 77: mod_base = OTHER; note = 2'-O-methyl modified nucleotide
  modified_base 78: mod_base = OTHER; note = 2'-O-methyl modified nucleotide
  modified_base 79: mod_base = OTHER; note = 2'-O-methyl modified nucleotide
  modified_base 80: mod_base = OTHER; note = 2'-O-methyl modified nucleotide
  modified_base 81: mod_base = OTHER; note = 2'-O-methyl modified nucleotide
  modified_base 82: mod_base = OTHER; note = 2'-O-methyl modified nucleotide
  modified_base 83: mod_base = OTHER; note = 2'-O-methyl modified nucleotide
  modified_base 84: mod_base = OTHER; note = 2'-O-methyl modified nucleotide
  modified_base 85: mod_base = OTHER; note = 2'-O-methyl modified nucleotide
  modified_base 86: mod_base = OTHER; note = 2'-O-methyl modified nucleotide
  modified_base 87: mod_base = OTHER; note = 2'-O-methyl modified nucleotide
  modified_base 88: mod_base = OTHER; note = 2'-O-methyl modified nucleotide
  modified_base 89: mod_base = OTHER; note = 2'-O-methyl modified nucleotide
  modified_base 90: mod_base = OTHER; note = 2'-O-methyl modified nucleotide
  modified_base 91: mod_base = OTHER; note = 2'-O-methyl modified nucleotide
  modified_base 92: mod_base = OTHER; note = 2'-O-methyl modified nucleotide
  modified_base 93: mod_base = OTHER; note = 2'-O-methyl modified nucleotide
  modified_base 94: mod_base = OTHER; note = 2'-O-methyl modified nucleotide
  modified_base 95: mod_base = OTHER; note = 2'-O-methyl modified nucleotide
  modified_base 96: mod_base = OTHER; note = 2'-O-methyl modified nucleotide
  modified_base 124: mod_base = OTHER; note = Nucleotide with phosphorothioate linkage
  modified_base 125: mod_base = OTHER; note = 2'-O-methyl modified nucleotide with phosphorothioate linkage
  modified_base 126: mod_base = OTHER; note = 2'-O-methyl modified nucleotide with phosphorothioate linkage
  modified_base 127: mod_base = OTHER; note = 2'-O-methyl modified nucleotide
gctggtacacggcagggtcagttttagagctagaaatagcaagttaaaataaggctagtccgttatcaacttgaaaaagtggcaccgagtcggtgcccagaaccctagttgatgaccctgccgtgta

SEQ ID NO: 16645 - RNA, 126 nt, synthetic construct
  source 1..126: mol_type = other RNA
  modified_base 1: mod_base = OTHER; note = 2'-O-methyl modified nucleotide with phosphorothioate linkage
  modified_base 2: mod_base = OTHER; note = 2'-O-methyl modified nucleotide with phosphorothioate linkage
  modified_base 3: mod_base = OTHER; note = 2'-O-methyl modified nucleotide with phosphorothioate linkage
  modified_base 29: mod_base = OTHER; note = 2'-O-methyl modified nucleotide
  modified_base 30: mod_base = OTHER; note = 2'-O-methyl modified nucleotide
  modified_base 31: mod_base = OTHER; note = 2'-O-methyl modified nucleotide
  modified_base 32: mod_base = OTHER; note = 2'-O-methyl modified nucleotide
  modified_base 33: mod_base = OTHER; note = 2'-O-methyl modified nucleotide
  modified_base 34: mod_base = OTHER; note = 2'-O-methyl modified nucleotide
  modified_base 35: mod_base = OTHER; note = 2'-O-methyl modified nucleotide
  modified_base 36: mod_base = OTHER; note = 2'-O-methyl modified nucleotide
  modified_base 37: mod_base = OTHER; note = 2'-O-methyl modified nucleotide
  modified_base 38: mod_base = OTHER; note = 2'-O-methyl modified nucleotide
  modified_base 39: mod_base = OTHER; note = 2'-O-methyl modified nucleotide
  modified_base 40: mod_base = OTHER; note = 2'-O-methyl modified nucleotide
  modified_base 69: mod_base = OTHER; note = 2'-O-methyl modified nucleotide
  modified_base 70: mod_base = OTHER; note = 2'-O-methyl modified nucleotide
  modified_base 71: mod_base = OTHER; note = 2'-O-methyl modified nucleotide
  modified_base 72: mod_base = OTHER; note = 2'-O-methyl modified nucleotide
  modified_base 73: mod_base = OTHER; note = 2'-O-methyl modified nucleotide
  modified_base 74: mod_base = OTHER; note = 2'-O-methyl modified nucleotide
  modified_base 75: mod_base = OTHER; note = 2'-O-methyl modified nucleotide
  modified_base 76: mod_base = OTHER; note = 2'-O-methyl modified nucleotide
  modified_base 77: mod_base = OTHER; note = 2'-O-methyl modified nucleotide
  modified_base 78: mod_base = OTHER; note = 2'-O-methyl modified nucleotide
  modified_base 79: mod_base = OTHER; note = 2'-O-methyl modified nucleotide
  modified_base 80: mod_base = OTHER; note = 2'-O-methyl modified nucleotide
  modified_base 81: mod_base = OTHER; note = 2'-O-methyl modified nucleotide
  modified_base 82: mod_base = OTHER; note = 2'-O-methyl modified nucleotide
  modified_base 83: mod_base = OTHER; note = 2'-O-methyl modified nucleotide
  modified_base 84: mod_base = OTHER; note = 2'-O-methyl modified nucleotide
  modified_base 85: mod_base = OTHER; note = 2'-O-methyl modified nucleotide
  modified_base 86: mod_base = OTHER; note = 2'-O-methyl modified nucleotide
  modified_base 87: mod_base = OTHER; note = 2'-O-methyl modified nucleotide
  modified_base 88: mod_base = OTHER; note = 2'-O-methyl modified nucleotide
  modified_base 89: mod_base = OTHER; note = 2'-O-methyl modified nucleotide
  modified_base 90: mod_base = OTHER; note = 2'-O-methyl modified nucleotide
  modified_base 91: mod_base = OTHER; note = 2'-O-methyl modified nucleotide
  modified_base 92: mod_base = OTHER; note = 2'-O-methyl modified nucleotide
  modified_base 93: mod_base = OTHER; note = 2'-O-methyl modified nucleotide
  modified_base 94: mod_base = OTHER; note = 2'-O-methyl modified nucleotide
  modified_base 95: mod_base = OTHER; note = 2'-O-methyl modified nucleotide
  modified_base 96: mod_base = OTHER; note = 2'-O-methyl modified nucleotide
  modified_base 123: mod_base = OTHER; note = Nucleotide with phosphorothioate linkage
  modified_base 124: mod_base = OTHER; note = 2'-O-methyl modified nucleotide with phosphorothioate linkage
  modified_base 125: mod_base = OTHER; note = 2'-O-methyl modified nucleotide with phosphorothioate linkage
  modified_base 126: mod_base = OTHER; note = 2'-O-methyl modified nucleotide
gctggtacacggcagggtcagttttagagctagaaatagcaagttaaaataaggctagtccgttatcaacttgaaaaagtggcaccgagtcggtgcccagaaccctagttgatgaccctgccgtgt

SEQ ID NO: 16646 - RNA, 125 nt, synthetic construct
  source 1..125: mol_type = other RNA
  modified_base 1: mod_base = OTHER; note = 2'-O-methyl modified nucleotide with phosphorothioate linkage
  modified_base 2: mod_base = OTHER; note = 2'-O-methyl modified nucleotide with phosphorothioate linkage
  modified_base 3: mod_base = OTHER; note = 2'-O-methyl modified nucleotide with phosphorothioate linkage
  modified_base 29: mod_base = OTHER; note = 2'-O-methyl modified nucleotide
  modified_base 30: mod_base = OTHER; note = 2'-O-methyl modified nucleotide
  modified_base 31: mod_base = OTHER; note = 2'-O-methyl modified nucleotide
  modified_base 32: mod_base = OTHER; note = 2'-O-methyl modified nucleotide
  modified_base 33: mod_base = OTHER; note = 2'-O-methyl modified nucleotide
  modified_base 34: mod_base = OTHER; note = 2'-O-methyl modified nucleotide
  modified_base 35: mod_base = OTHER; note = 2'-O-methyl modified nucleotide
  modified_base 36: mod_base = OTHER; note = 2'-O-methyl modified nucleotide
  modified_base 37: mod_base = OTHER; note = 2'-O-methyl modified nucleotide
  modified_base 38: mod_base = OTHER; note = 2'-O-methyl modified nucleotide
  modified_base 39: mod_base = OTHER; note = 2'-O-methyl modified nucleotide
  modified_base 40: mod_base = OTHER; note = 2'-O-methyl modified nucleotide
  modified_base 69: mod_base = OTHER; note = 2'-O-methyl modified nucleotide
  modified_base 70: mod_base = OTHER; note = 2'-O-methyl modified nucleotide
  modified_base 71: mod_base = OTHER; note = 2'-O-methyl modified nucleotide
  modified_base 72: mod_base = OTHER; note = 2'-O-methyl modified nucleotide
  modified_base 73: mod_base = OTHER; note = 2'-O-methyl modified nucleotide
  modified_base 74: mod_base = OTHER; note = 2'-O-methyl modified nucleotide
  modified_base 75: mod_base = OTHER; note = 2'-O-methyl modified nucleotide
  modified_base 76: mod_base = OTHER; note = 2'-O-methyl modified nucleotide
  modified_base 77: mod_base = OTHER; note = 2'-O-methyl modified nucleotide
  modified_base 78: mod_base = OTHER; note = 2'-O-methyl modified nucleotide
  modified_base 79: mod_base = OTHER; note = 2'-O-methyl modified nucleotide
  modified_base 80: mod_base = OTHER; note = 2'-O-methyl modified nucleotide
  modified_base 81: mod_base = OTHER; note = 2'-O-methyl modified nucleotide
  modified_base 82: mod_base = OTHER; note = 2'-O-methyl modified nucleotide
  modified_base 83: mod_base = OTHER; note = 2'-O-methyl modified nucleotide
  modified_base 84: mod_base = OTHER; note = 2'-O-methyl modified nucleotide
  modified_base 85: mod_base = OTHER; note = 2'-O-methyl modified nucleotide
  modified_base 86: mod_base = OTHER; note = 2'-O-methyl modified nucleotide
  modified_base 87: mod_base = OTHER; note = 2'-O-methyl modified nucleotide
  modified_base 88: mod_base = OTHER; note = 2'-O-methyl modified nucleotide
  modified_base 89: mod_base = OTHER; note = 2'-O-methyl modified nucleotide
  modified_base 90: mod_base = OTHER; note = 2'-O-methyl modified nucleotide
  modified_base 91: mod_base = OTHER; note = 2'-O-methyl modified nucleotide
  modified_base 92: mod_base = OTHER; note = 2'-O-methyl modified nucleotide
  modified_base 93: mod_base = OTHER; note = 2'-O-methyl modified nucleotide
  modified_base 94: mod_base = OTHER; note = 2'-O-methyl modified nucleotide
  modified_base 95: mod_base = OTHER; note = 2'-O-methyl modified nucleotide
  modified_base 96: mod_base = OTHER; note = 2'-O-methyl modified nucleotide
  modified_base 122: mod_base = OTHER; note = Nucleotide with phosphorothioate linkage
  modified_base 123: mod_base = OTHER; note = 2'-O-methyl modified nucleotide with phosphorothioate linkage
  modified_base 124: mod_base = OTHER; note = 2'-O-methyl modified nucleotide with phosphorothioate linkage
  modified_base 125: mod_base = OTHER; note = 2'-O-methyl modified nucleotide
gctggtacacggcagggtcagttttagagctagaaatagcaagttaaaataaggctagtccgttatcaacttgaaaaagtggcaccgagtcggtgcccagaaccctagttgatgaccctgccgtg

SEQ ID NO: 16647 - RNA, 124 nt, synthetic construct
  source 1..124: mol_type = other RNA
  modified_base 1: mod_base = OTHER; note = 2'-O-methyl modified nucleotide with phosphorothioate linkage
  modified_base 2: mod_base = OTHER; note = 2'-O-methyl modified nucleotide with phosphorothioate linkage
  modified_base 3: mod_base = OTHER; note = 2'-O-methyl modified nucleotide with phosphorothioate linkage
  modified_base 29: mod_base = OTHER; note = 2'-O-methyl modified nucleotide
  modified_base 30: mod_base = OTHER; note = 2'-O-methyl modified nucleotide
  modified_base 31: mod_base = OTHER; note = 2'-O-methyl modified nucleotide
  modified_base 32: mod_base = OTHER; note = 2'-O-methyl modified nucleotide
  modified_base 33: mod_base = OTHER; note = 2'-O-methyl modified nucleotide
  modified_base 34: mod_base = OTHER; note = 2'-O-methyl modified nucleotide
  modified_base 35: mod_base = OTHER; note = 2'-O-methyl modified nucleotide
  modified_base 36: mod_base = OTHER; note = 2'-O-methyl modified nucleotide
  modified_base 37: mod_base = OTHER; note = 2'-O-methyl modified nucleotide
  modified_base 38: mod_base = OTHER; note = 2'-O-methyl modified nucleotide
  modified_base 39: mod_base = OTHER; note = 2'-O-methyl modified nucleotide
  modified_base 40: mod_base = OTHER; note = 2'-O-methyl modified nucleotide
  modified_base 69: mod_base = OTHER; note = 2'-O-methyl modified nucleotide
  modified_base 70: mod_base = OTHER; note = 2'-O-methyl modified nucleotide
  modified_base 71: mod_base = OTHER; note = 2'-O-methyl modified nucleotide
  modified_base 72: mod_base = OTHER; note = 2'-O-methyl modified nucleotide
  modified_base 73: mod_base = OTHER; note = 2'-O-methyl modified nucleotide
  modified_base 74: mod_base = OTHER; note = 2'-O-methyl modified nucleotide
  modified_base 75: mod_base = OTHER; note = 2'-O-methyl modified nucleotide
  modified_base 76: mod_base = OTHER; note = 2'-O-methyl modified nucleotide
  modified_base 77: mod_base = OTHER; note = 2'-O-methyl modified nucleotide
  modified_base 78: mod_base = OTHER; note = 2'-O-methyl modified nucleotide
  modified_base 79: mod_base = OTHER; note = 2'-O-methyl modified nucleotide
  modified_base 80: mod_base = OTHER; note = 2'-O-methyl modified nucleotide
  modified_base 81: mod_base = OTHER; note = 2'-O-methyl modified nucleotide
  modified_base 82: mod_base = OTHER; note = 2'-O-methyl modified nucleotide
  modified_base 83: mod_base = OTHER; note = 2'-O-methyl modified nucleotide
  modified_base 84: mod_base = OTHER; note = 2'-O-methyl modified nucleotide
  modified_base 85: mod_base = OTHER; note = 2'-O-methyl modified nucleotide
  modified_base 86: mod_base = OTHER; note = 2'-O-methyl modified nucleotide
  modified_base 87: mod_base = OTHER; note = 2'-O-methyl modified nucleotide
  modified_base 88: mod_base = OTHER; note = 2'-O-methyl modified nucleotide
  modified_base 89: mod_base = OTHER; note = 2'-O-methyl modified nucleotide
  modified_base 90: mod_base = OTHER; note = 2'-O-methyl modified nucleotide
  modified_base 91: mod_base = OTHER; note = 2'-O-methyl modified nucleotide
  modified_base 92: mod_base = OTHER; note = 2'-O-methyl modified nucleotide
  modified_base 93: mod_base = OTHER; note = 2'-O-methyl modified nucleotide
  modified_base 94: mod_base = OTHER; note = 2'-O-methyl modified nucleotide
  modified_base 95: mod_base = OTHER; note = 2'-O-methyl modified nucleotide
  modified_base 96: mod_base = OTHER; note = 2'-O-methyl modified nucleotide
  modified_base 121: mod_base = OTHER; note = Nucleotide with phosphorothioate linkage
  modified_base 122: mod_base = OTHER; note = 2'-O-methyl modified nucleotide with phosphorothioate linkage
  modified_base 123: mod_base = OTHER; note = 2'-O-methyl modified nucleotide with phosphorothioate linkage
  modified_base 124: mod_base = OTHER; note = 2'-O-methyl modified nucleotide
gctggtacacggcagggtcagttttagagctagaaatagcaagttaaaataaggctagtccgttatcaacttgaaaaagtggcaccgagtcggtgcccagaaccctagttgatgaccctgccgt

SEQ ID NO: 16648 - RNA, 123 nt, synthetic construct
  source 1..123: mol_type = other RNA
  modified_base 1: mod_base = OTHER; note = 2'-O-methyl modified nucleotide with phosphorothioate linkage
  modified_base 2: mod_base = OTHER; note = 2'-O-methyl modified nucleotide with phosphorothioate linkage
  modified_base 3: mod_base = OTHER; note = 2'-O-methyl modified nucleotide with phosphorothioate linkage
  modified_base 29: mod_base = OTHER; note = 2'-O-methyl modified nucleotide
  modified_base 30: mod_base = OTHER; note = 2'-O-methyl modified nucleotide
  modified_base 31: mod_base = OTHER; note = 2'-O-methyl modified nucleotide
  modified_base 32: mod_base = OTHER; note = 2'-O-methyl modified nucleotide
  modified_base 33: mod_base = OTHER; note = 2'-O-methyl modified nucleotide
  modified_base 34: mod_base = OTHER; note = 2'-O-methyl modified nucleotide
  modified_base 35: mod_base = OTHER; note = 2'-O-methyl modified nucleotide
  modified_base 36: mod_base = OTHER; note = 2'-O-methyl modified nucleotide
  modified_base 37: mod_base = OTHER; note = 2'-O-methyl modified nucleotide
  modified_base 38: mod_base = OTHER; note = 2'-O-methyl modified nucleotide
  modified_base 39: mod_base = OTHER; note = 2'-O-methyl modified nucleotide
  modified_base 40: mod_base = OTHER; note = 2'-O-methyl modified nucleotide
  modified_base 69: mod_base = OTHER; note = 2'-O-methyl modified nucleotide
  modified_base 70: mod_base = OTHER; note = 2'-O-methyl modified nucleotide
  modified_base 71: mod_base = OTHER; note = 2'-O-methyl modified nucleotide
  modified_base 72: mod_base = OTHER; note = 2'-O-methyl modified nucleotide
  modified_base 73: mod_base = OTHER; note = 2'-O-methyl modified nucleotide
  modified_base 74: mod_base = OTHER; note = 2'-O-methyl modified nucleotide
  modified_base 75: mod_base = OTHER; note = 2'-O-methyl modified nucleotide
  modified_base 76: mod_base = OTHER; note = 2'-O-methyl modified nucleotide
  modified_base 77: mod_base = OTHER; note = 2'-O-methyl modified nucleotide
  modified_base 78: mod_base = OTHER; note = 2'-O-methyl modified nucleotide
  modified_base 79: mod_base = OTHER; note = 2'-O-methyl modified nucleotide
  modified_base 80: mod_base = OTHER; note = 2'-O-methyl modified nucleotide
  modified_base 81: mod_base = OTHER; note = 2'-O-methyl modified nucleotide
  modified_base 82: mod_base = OTHER; note = 2'-O-methyl modified nucleotide
  modified_base 83: mod_base = OTHER; note = 2'-O-methyl modified nucleotide
  modified_base 84: mod_base = OTHER; note = 2'-O-methyl modified nucleotide
  modified_base 85: mod_base = OTHER; note = 2'-O-methyl modified nucleotide
  modified_base 86: mod_base = OTHER; note = 2'-O-methyl modified nucleotide
  modified_base 87: mod_base = OTHER; note = 2'-O-methyl modified nucleotide
  modified_base 88: mod_base = OTHER; note = 2'-O-methyl modified nucleotide
  modified_base 89: mod_base = OTHER; note = 2'-O-methyl modified nucleotide
  modified_base 90: mod_base = OTHER; note = 2'-O-methyl modified nucleotide
  modified_base 91: mod_base = OTHER; note = 2'-O-methyl modified nucleotide
  modified_base 92: mod_base = OTHER; note = 2'-O-methyl modified nucleotide
  modified_base 93: mod_base = OTHER; note = 2'-O-methyl modified nucleotide
  modified_base 94: mod_base = OTHER; note = 2'-O-methyl modified nucleotide
  modified_base 95: mod_base = OTHER; note = 2'-O-methyl modified nucleotide
  modified_base 96: mod_base = OTHER; note = 2'-O-methyl modified nucleotide
  modified_base 120: mod_base = OTHER; note = Nucleotide with phosphorothioate linkage
  modified_base 121: mod_base = OTHER; note = 2'-O-methyl modified nucleotide with phosphorothioate linkage
  modified_base 122: mod_base = OTHER; note = 2'-O-methyl modified nucleotide with phosphorothioate linkage
  modified_base 123: mod_base = OTHER; note = 2'-O-methyl modified nucleotide
gctggtacacggcagggtcagttttagagctagaaatagcaagttaaaataaggctagtccgttatcaacttgaaaaagtggcaccgagtcggtgcccagaaccctagttgatgaccctgccg

SEQ ID NO: 16649 - RNA, 130 nt, synthetic construct
  source 1..130: mol_type = other RNA
  modified_base 1: mod_base = OTHER; note = 2'-O-methyl modified nucleotide with phosphorothioate linkage
  modified_base 2: mod_base = OTHER; note = 2'-O-methyl modified nucleotide with phosphorothioate linkage
  modified_base 3: mod_base = OTHER; note = 2'-O-methyl modified nucleotide with phosphorothioate linkage
  modified_base 29: mod_base = OTHER; note = 2'-O-methyl modified nucleotide
  modified_base 30: mod_base = OTHER; note = 2'-O-methyl modified nucleotide
  modified_base 31: mod_base = OTHER; note = 2'-O-methyl modified nucleotide
  modified_base 32: mod_base = OTHER; note = 2'-O-methyl modified nucleotide
  modified_base 33: mod_base = OTHER; note = 2'-O-methyl modified nucleotide
  modified_base 34: mod_base = OTHER; note = 2'-O-methyl modified nucleotide
  modified_base 35: mod_base = OTHER; note = 2'-O-methyl modified nucleotide
  modified_base 36: mod_base = OTHER; note = 2'-O-methyl modified nucleotide
  modified_base 37: mod_base = OTHER; note = 2'-O-methyl modified nucleotide
  modified_base 38: mod_base = OTHER; note = 2'-O-methyl modified nucleotide
  modified_base 39: mod_base = OTHER; note = 2'-O-methyl modified nucleotide
  modified_base 40: mod_base = OTHER; note = 2'-O-methyl modified nucleotide
  modified_base 69: mod_base = OTHER; note = 2'-O-methyl modified nucleotide
  modified_base 70: mod_base = OTHER; note = 2'-O-methyl modified nucleotide
  modified_base 71: mod_base = OTHER; note = 2'-O-methyl modified nucleotide
  modified_base 72: mod_base = OTHER; note = 2'-O-methyl modified nucleotide
  modified_base 73: mod_base = OTHER; note = 2'-O-methyl modified nucleotide
  modified_base 74: mod_base = OTHER; note = 2'-O-methyl modified nucleotide
  modified_base 75: mod_base = OTHER; note = 2'-O-methyl modified nucleotide
  modified_base 76: mod_base = OTHER; note = 2'-O-methyl modified nucleotide
  modified_base 77: mod_base = OTHER; note = 2'-O-methyl modified nucleotide
  modified_base 78: mod_base = OTHER; note = 2'-O-methyl modified nucleotide
  modified_base 79: mod_base = OTHER; note = 2'-O-methyl modified nucleotide
  modified_base 80: mod_base = OTHER; note = 2'-O-methyl modified nucleotide
  modified_base 81: mod_base = OTHER; note = 2'-O-methyl modified nucleotide
  modified_base 82: mod_base = OTHER; note = 2'-O-methyl modified nucleotide
  modified_base 83: mod_base = OTHER; note = 2'-O-methyl modified nucleotide
  modified_base 84: mod_base = OTHER; note = 2'-O-methyl modified nucleotide
  modified_base 85: mod_base = OTHER; note = 2'-O-methyl modified nucleotide
  modified_base 86: mod_base = OTHER; note = 2'-O-methyl modified nucleotide
  modified_base 87: mod_base = OTHER; note = 2'-O-methyl modified nucleotide
  modified_base 88: mod_base = OTHER; note = 2'-O-methyl modified nucleotide
  modified_base 89: mod_base = OTHER; note = 2'-O-methyl modified nucleotide
  modified_base 90: mod_base = OTHER; note = 2'-O-methyl modified nucleotide
  modified_base 91: mod_base = OTHER; note = 2'-O-methyl modified nucleotide
  modified_base 92: mod_base = OTHER; note = 2'-O-methyl modified nucleotide
  modified_base 93: mod_base = OTHER; note = 2'-O-methyl modified nucleotide
  modified_base 94: mod_base = OTHER; note = 2'-O-methyl modified nucleotide
  modified_base 95: mod_base = OTHER; note = 2'-O-methyl modified nucleotide
  modified_base 96: mod_base = OTHER; note = 2'-O-methyl modified nucleotide
  modified_base 127: mod_base = OTHER; note = Nucleotide with phosphorothioate linkage
  modified_base 128: mod_base = OTHER; note = 2'-O-methyl modified nucleotide with phosphorothioate linkage
  modified_base 129: mod_base = OTHER; note = 2'-O-methyl modified nucleotide with phosphorothioate linkage
  modified_base 130: mod_base = OTHER; note = 2'-O-methyl modified nucleotide
gctggtacacggcagggtcagttttagagctagaaatagcaagttaaaataaggctagtccgttatcaacttgaaaaagtggcaccgagtcggtgcatccagaaccctagttgatgaccctgccgtgtac

SEQ ID NO: 16650 - RNA, 129 nt, synthetic construct
  source 1..129: mol_type = other RNA
  modified_base 1: mod_base = OTHER; note = 2'-O-methyl modified nucleotide with phosphorothioate linkage
  modified_base 2: mod_base = OTHER; note = 2'-O-methyl modified nucleotide with phosphorothioate linkage
  modified_base 3: mod_base = OTHER; note = 2'-O-methyl modified nucleotide with phosphorothioate linkage
  modified_base 29: mod_base = OTHER; note = 2'-O-methyl modified nucleotide
  modified_base 30: mod_base = OTHER; note = 2'-O-methyl modified nucleotide
  modified_base 31: mod_base = OTHER; note = 2'-O-methyl modified nucleotide
  modified_base 32: mod_base = OTHER; note = 2'-O-methyl modified nucleotide
  modified_base 33: mod_base = OTHER; note = 2'-O-methyl modified nucleotide
  modified_base 34: mod_base = OTHER; note = 2'-O-methyl modified nucleotide
  modified_base 35: mod_base = OTHER; note = 2'-O-methyl modified nucleotide
  modified_base 36: mod_base = OTHER; note = 2'-O-methyl modified nucleotide
  modified_base 37: mod_base = OTHER; note = 2'-O-methyl modified nucleotide
  modified_base 38: mod_base = OTHER; note = 2'-O-methyl modified nucleotide
  modified_base 39: mod_base = OTHER; note = 2'-O-methyl modified nucleotide
  modified_base 40: mod_base = OTHER; note = 2'-O-methyl modified nucleotide
  modified_base 69: mod_base = OTHER; note = 2'-O-methyl modified nucleotide
  modified_base 70: mod_base = OTHER; note = 2'-O-methyl modified nucleotide
  modified_base 71: mod_base = OTHER; note = 2'-O-methyl modified nucleotide
  modified_base 72: mod_base = OTHER; note = 2'-O-methyl modified nucleotide
  modified_base 73: mod_base = OTHER; note = 2'-O-methyl modified nucleotide
  modified_base 74: mod_base = OTHER; note = 2'-O-methyl modified nucleotide
  modified_base 75: mod_base = OTHER; note = 2'-O-methyl modified nucleotide
  modified_base 76: mod_base = OTHER; note = 2'-O-methyl modified nucleotide
  modified_base 77: mod_base = OTHER; note = 2'-O-methyl modified nucleotide
  modified_base 78: mod_base = OTHER; note = 2'-O-methyl modified nucleotide
  modified_base 79: mod_base = OTHER; note = 2'-O-methyl modified nucleotide
  modified_base 80: mod_base = OTHER; note = 2'-O-methyl modified nucleotide
  modified_base 81: mod_base = OTHER; note = 2'-O-methyl modified nucleotide
  modified_base 82: mod_base = OTHER; note = 2'-O-methyl modified nucleotide
  modified_base 83: mod_base = OTHER; note = 2'-O-methyl modified nucleotide
  modified_base 84: mod_base = OTHER; note = 2'-O-methyl modified nucleotide
  modified_base 85: mod_base = OTHER; note = 2'-O-methyl modified nucleotide
  modified_base 86: mod_base = OTHER; note = 2'-O-methyl modified nucleotide
  modified_base 87: mod_base = OTHER; note = 2'-O-methyl modified nucleotide
  modified_base 88: mod_base = OTHER; note = 2'-O-methyl modified nucleotide
  modified_base 89: mod_base = OTHER; note = 2'-O-methyl modified nucleotide
  modified_base 90: mod_base = OTHER; note = 2'-O-methyl modified nucleotide
  modified_base 91: mod_base = OTHER; note = 2'-O-methyl modified nucleotide
  modified_base 92: mod_base = OTHER; note = 2'-O-methyl modified nucleotide
  modified_base 93: mod_base = OTHER; note = 2'-O-methyl modified nucleotide
  modified_base 94: mod_base = OTHER; note = 2'-O-methyl modified nucleotide
  modified_base 95: mod_base = OTHER; note = 2'-O-methyl modified nucleotide
  modified_base 96: mod_base = OTHER; note = 2'-O-methyl modified nucleotide
  modified_base 126: mod_base = OTHER; note = Nucleotide with phosphorothioate linkage
  modified_base 127: mod_base = OTHER; note = 2'-O-methyl modified nucleotide with phosphorothioate linkage
  modified_base 128: mod_base = OTHER; note = 2'-O-methyl modified nucleotide with phosphorothioate linkage
  modified_base 129: mod_base = OTHER; note = 2'-O-methyl modified nucleotide
gctggtacacggcagggtcagttttagagctagaaatagcaagttaaaataaggctagtccgttatcaacttgaaaaagtggcaccgagtcggtgcatccagaaccctagttgatgaccctgccgtgta

SEQ ID NO: 16651 - RNA, 128 nt, synthetic construct
  source 1..128: mol_type = other RNA
  modified_base 1: mod_base = OTHER; note = 2'-O-methyl modified nucleotide with phosphorothioate linkage
  modified_base 2: mod_base = OTHER; note = 2'-O-methyl modified nucleotide with phosphorothioate linkage
  modified_base 3: mod_base = OTHER; note = 2'-O-methyl modified nucleotide with phosphorothioate linkage
  modified_base 29: mod_base = OTHER; note = 2'-O-methyl modified nucleotide
  modified_base 30: mod_base = OTHER; note = 2'-O-methyl modified nucleotide
  modified_base 31: mod_base = OTHER; note = 2'-O-methyl modified nucleotide
  modified_base 32: mod_base = OTHER; note = 2'-O-methyl modified nucleotide
  modified_base 33: mod_base = OTHER; note = 2'-O-methyl modified nucleotide
  modified_base 34: mod_base = OTHER; note = 2'-O-methyl modified nucleotide
  modified_base 35: mod_base = OTHER; note = 2'-O-methyl modified nucleotide
  modified_base 36: mod_base = OTHER; note = 2'-O-methyl modified nucleotide
  modified_base 37: mod_base = OTHER; note = 2'-O-methyl modified nucleotide
  modified_base 38: mod_base = OTHER; note = 2'-O-methyl modified nucleotide
  modified_base 39: mod_base = OTHER; note = 2'-O-methyl modified nucleotide
  modified_base 40: mod_base = OTHER; note = 2'-O-methyl modified nucleotide
  modified_base 69: mod_base = OTHER; note = 2'-O-methyl modified nucleotide
  modified_base 70: mod_base = OTHER; note = 2'-O-methyl modified nucleotide
  modified_base 71: mod_base = OTHER; note = 2'-O-methyl modified nucleotide
  modified_base 72: mod_base = OTHER; note = 2'-O-methyl modified nucleotide
  modified_base 73: mod_base = OTHER; note = 2'-O-methyl modified nucleotide
  modified_base 74: mod_base = OTHER; note = 2'-O-methyl modified nucleotide
  modified_base 75: mod_base = OTHER; note = 2'-O-methyl modified nucleotide
  modified_base 76: mod_base = OTHER; note = 2'-O-methyl modified nucleotide
  modified_base 77: mod_base = OTHER; note = 2'-O-methyl modified nucleotide
  modified_base 78: mod_base = OTHER; note = 2'-O-methyl modified nucleotide
  modified_base 79: mod_base = OTHER; note = 2'-O-methyl modified nucleotide
  modified_base 80: mod_base = OTHER; note = 2'-O-methyl modified nucleotide
  modified_base 81: mod_base = OTHER; note = 2'-O-methyl modified nucleotide
  modified_base 82: mod_base = OTHER; note = 2'-O-methyl modified nucleotide
  modified_base 83: mod_base = OTHER; note = 2'-O-methyl modified nucleotide
  modified_base 84: mod_base = OTHER; note = 2'-O-methyl modified nucleotide
  modified_base 85: mod_base = OTHER; note = 2'-O-methyl modified nucleotide
  modified_base 86: mod_base = OTHER; note = 2'-O-methyl modified nucleotide
  modified_base 87: mod_base = OTHER; note = 2'-O-methyl modified nucleotide
  modified_base 88: mod_base = OTHER; note = 2'-O-methyl modified nucleotide
  modified_base 89: mod_base = OTHER; note = 2'-O-methyl modified nucleotide
  modified_base 90: mod_base = OTHER; note = 2'-O-methyl modified nucleotide
  modified_base 91: mod_base = OTHER; note = 2'-O-methyl modified nucleotide
  modified_base 92: mod_base = OTHER; note = 2'-O-methyl modified nucleotide
  modified_base 93: mod_base = OTHER; note = 2'-O-methyl modified nucleotide
  modified_base 94: mod_base = OTHER; note = 2'-O-methyl modified nucleotide
  modified_base 95: mod_base = OTHER; note = 2'-O-methyl modified nucleotide
  modified_base 96: mod_base = OTHER; note = 2'-O-methyl modified nucleotide
  modified_base 125: mod_base = OTHER; note = Nucleotide with phosphorothioate linkage
  modified_base 126: mod_base = OTHER; note = 2'-O-methyl modified nucleotide with phosphorothioate linkage
  modified_base 127: mod_base = OTHER; note = 2'-O-methyl modified nucleotide with phosphorothioate linkage
  modified_base 128: mod_base = OTHER; note = 2'-O-methyl modified nucleotide
gctggtacacggcagggtcagttttagagctagaaatagcaagttaaaataaggctagtccgttatcaacttgaaaaagtggcaccgagtcggtgcatccagaaccctagttgatgaccctgccgtgt

SEQ ID NO: 16652 - RNA, 127 nt, synthetic construct
  source 1..127: mol_type = other RNA
  modified_base 1: mod_base = OTHER; note = 2'-O-methyl modified nucleotide with phosphorothioate linkage
  modified_base 2: mod_base = OTHER; note = 2'-O-methyl modified nucleotide with phosphorothioate linkage
  modified_base 3: mod_base = OTHER; note = 2'-O-methyl modified nucleotide with phosphorothioate linkage
  modified_base 29: mod_base = OTHER; note = 2'-O-methyl modified nucleotide
  modified_base 30: mod_base = OTHER; note = 2'-O-methyl modified nucleotide
  modified_base 31: mod_base = OTHER; note = 2'-O-methyl modified nucleotide
  modified_base 32: mod_base = OTHER; note = 2'-O-methyl modified nucleotide
  modified_base 33: mod_base = OTHER; note = 2'-O-methyl modified nucleotide
  modified_base 34: mod_base = OTHER; note = 2'-O-methyl modified nucleotide
  modified_base 35: mod_base = OTHER; note = 2'-O-methyl modified nucleotide
  modified_base 36: mod_base = OTHER; note = 2'-O-methyl modified nucleotide
  modified_base 37: mod_base = OTHER; note = 2'-O-methyl modified nucleotide
  modified_base 38: mod_base = OTHER; note = 2'-O-methyl modified nucleotide
  modified_base 39: mod_base = OTHER; note = 2'-O-methyl modified nucleotide
  modified_base 40: mod_base = OTHER; note = 2'-O-methyl modified nucleotide
  modified_base 69: mod_base = OTHER; note = 2'-O-methyl modified nucleotide
  modified_base 70: mod_base = OTHER; note = 2'-O-methyl modified nucleotide
  modified_base 71: mod_base = OTHER; note = 2'-O-methyl modified nucleotide
  modified_base 72: mod_base = OTHER; note = 2'-O-methyl modified nucleotide
  modified_base 73: mod_base = OTHER; note = 2'-O-methyl modified nucleotide
  modified_base 74: mod_base = OTHER; note = 2'-O-methyl modified nucleotide
  modified_base 75: mod_base = OTHER; note = 2'-O-methyl modified nucleotide
  modified_base 76: mod_base = OTHER; note = 2'-O-methyl modified nucleotide
  modified_base 77: mod_base = OTHER; note = 2'-O-methyl modified nucleotide
  modified_base 78: mod_base = OTHER; note = 2'-O-methyl modified nucleotide
  modified_base 79: mod_base = OTHER; note = 2'-O-methyl modified nucleotide
  modified_base 80: mod_base = OTHER; note = 2'-O-methyl modified nucleotide
  modified_base 81: mod_base = OTHER; note = 2'-O-methyl modified nucleotide
  modified_base 82: mod_base = OTHER; note = 2'-O-methyl modified nucleotide
  modified_base 83: mod_base = OTHER; note = 2'-O-methyl modified nucleotide
  modified_base 84: mod_base = OTHER; note = 2'-O-methyl modified nucleotide
  modified_base 85: mod_base = OTHER; note = 2'-O-methyl modified nucleotide
  modified_base 86: mod_base = OTHER; note = 2'-O-methyl modified nucleotide
  modified_base 87: mod_base = OTHER; note = 2'-O-methyl modified nucleotide
  modified_base 88: mod_base = OTHER; note = 2'-O-methyl modified nucleotide
  modified_base 89: mod_base = OTHER; note = 2'-O-methyl modified nucleotide
  modified_base 90: mod_base = OTHER; note = 2'-O-methyl modified nucleotide
  modified_base 91: mod_base = OTHER; note = 2'-O-methyl modified nucleotide
  modified_base 92: mod_base = OTHER; note = 2'-O-methyl modified nucleotide
  modified_base 93: mod_base = OTHER; note = 2'-O-methyl modified nucleotide
  modified_base 94: mod_base = OTHER; note = 2'-O-methyl modified nucleotide
  modified_base 95: mod_base = OTHER; note = 2'-O-methyl modified nucleotide
  modified_base 96: mod_base = OTHER; note = 2'-O-methyl modified nucleotide
  modified_base 124: mod_base = OTHER; note = Nucleotide with phosphorothioate linkage
  modified_base 125: mod_base = OTHER; note = 2'-O-methyl modified nucleotide with phosphorothioate linkage
  modified_base 126: mod_base = OTHER; note = 2'-O-methyl modified nucleotide with phosphorothioate linkage
  modified_base 127: mod_base = OTHER; note = 2'-O-methyl modified nucleotide
gctggtacacggcagggtcagttttagagctagaaatagcaagttaaaataaggctagtccgttatcaacttgaaaaagtggcaccgagtcggtgcatccagaaccctagttgatgaccctgccgtg

SEQ ID NO: 16653 - RNA, 126 nt, synthetic construct
  source 1..126: mol_type = other RNA
  modified_base 1: mod_base = OTHER; note = 2'-O-methyl modified nucleotide with phosphorothioate linkage
  modified_base 2: mod_base = OTHER; note = 2'-O-methyl modified nucleotide with phosphorothioate linkage
  modified_base 3: mod_base = OTHER; note = 2'-O-methyl modified nucleotide with phosphorothioate linkage
  modified_base 29: mod_base = OTHER; note = 2'-O-methyl modified nucleotide
  modified_base 30: mod_base = OTHER; note = 2'-O-methyl modified nucleotide
  modified_base 31: mod_base = OTHER; note = 2'-O-methyl modified nucleotide
  modified_base 32: mod_base = OTHER; note = 2'-O-methyl modified nucleotide
  modified_base 33: mod_base = OTHER; note = 2'-O-methyl modified nucleotide
  modified_base 34: mod_base = OTHER; note = 2'-O-methyl modified nucleotide
  modified_base 35: mod_base = OTHER; note = 2'-O-methyl modified nucleotide
  modified_base 36: mod_base = OTHER; note = 2'-O-methyl modified nucleotide
  modified_base 37: mod_base = OTHER; note = 2'-O-methyl modified nucleotide
  modified_base 38: mod_base = OTHER; note = 2'-O-methyl modified nucleotide
  modified_base 39: mod_base = OTHER; note = 2'-O-methyl modified nucleotide
  modified_base 40: mod_base = OTHER; note = 2'-O-methyl modified nucleotide
  modified_base 69: mod_base = OTHER; note = 2'-O-methyl modified nucleotide
  modified_base 70: mod_base = OTHER; note = 2'-O-methyl modified nucleotide
  modified_base 71: mod_base = OTHER; note = 2'-O-methyl modified nucleotide
  modified_base 72: mod_base = OTHER; note = 2'-O-methyl modified nucleotide
  modified_base 73: mod_base = OTHER; note = 2'-O-methyl modified nucleotide
  modified_base 74: mod_base = OTHER; note = 2'-O-methyl modified nucleotide
  modified_base 75: mod_base = OTHER; note = 2'-O-methyl modified nucleotide
  modified_base 76: mod_base = OTHER; note = 2'-O-methyl modified nucleotide
  modified_base 77: mod_base = OTHER; note = 2'-O-methyl modified nucleotide
  modified_base 78: mod_base = OTHER; note = 2'-O-methyl modified nucleotide
  modified_base 79: mod_base = OTHER; note = 2'-O-methyl modified nucleotide
  modified_base 80: mod_base = OTHER; note = 2'-O-methyl modified nucleotide
  modified_base 81: mod_base = OTHER; note = 2'-O-methyl modified nucleotide
  modified_base 82: mod_base = OTHER; note = 2'-O-methyl modified nucleotide
  modified_base 83: mod_base = OTHER; note = 2'-O-methyl modified nucleotide
  modified_base 84: mod_base = OTHER; note = 2'-O-methyl modified nucleotide
  modified_base 85: mod_base = OTHER; note = 2'-O-methyl modified nucleotide
  modified_base 86: mod_base = OTHER; note = 2'-O-methyl modified nucleotide
  modified_base 87: mod_base = OTHER; note = 2'-O-methyl modified nucleotide
  modified_base 88: mod_base = OTHER; note = 2'-O-methyl modified nucleotide
  modified_base 89: mod_base = OTHER; note = 2'-O-methyl modified nucleotide
  modified_base 90: mod_base = OTHER; note = 2'-O-methyl modified nucleotide
  modified_base 91: mod_base = OTHER; note = 2'-O-methyl modified nucleotide
  modified_base 92: mod_base = OTHER; note = 2'-O-methyl modified nucleotide
  modified_base 93: mod_base = OTHER; note = 2'-O-methyl modified nucleotide
  modified_base 94: mod_base = OTHER; note = 2'-O-methyl modified nucleotide
  modified_base 95: mod_base = OTHER; note = 2'-O-methyl modified nucleotide
  modified_base 96: mod_base = OTHER; note = 2'-O-methyl modified nucleotide
  modified_base 123: mod_base = OTHER; note = Nucleotide with phosphorothioate linkage
  modified_base 124: mod_base = OTHER; note = 2'-O-methyl modified nucleotide with phosphorothioate linkage
  modified_base 125: mod_base = OTHER; note = 2'-O-methyl modified nucleotide with phosphorothioate linkage
  modified_base 126: mod_base = OTHER; note = 2'-O-methyl modified nucleotide
gctggtacacggcagggtcagttttagagctagaaatagcaagttaaaataaggctagtccgttatcaacttgaaaaagtggcaccgagtcggtgcatccagaaccctagttgatgaccctgccgt

SEQ ID NO: 16654 - RNA, 125 nt, synthetic construct
  source 1..125: mol_type = other RNA
  modified_base 1: mod_base = OTHER; note = 2'-O-methyl modified nucleotide with phosphorothioate linkage
  modified_base 2: mod_base = OTHER; note = 2'-O-methyl modified nucleotide with phosphorothioate linkage
  modified_base 3: mod_base = OTHER; note = 2'-O-methyl modified nucleotide with phosphorothioate linkage
  modified_base 29: mod_base = OTHER; note = 2'-O-methyl modified nucleotide
  modified_base 30: mod_base = OTHER; note = 2'-O-methyl modified nucleotide
  modified_base 31: mod_base = OTHER; note = 2'-O-methyl modified nucleotide
  modified_base 32: mod_base = OTHER; note = 2'-O-methyl modified nucleotide
  modified_base 33: mod_base = OTHER; note = 2'-O-methyl modified nucleotide
  modified_base 34: mod_base = OTHER; note = 2'-O-methyl modified nucleotide
  modified_base 35: mod_base = OTHER; note = 2'-O-methyl modified nucleotide
  modified_base 36: mod_base = OTHER; note = 2'-O-methyl modified nucleotide
  modified_base 37: mod_base = OTHER; note = 2'-O-methyl modified nucleotide
  modified_base 38: mod_base = OTHER; note = 2'-O-methyl modified nucleotide
  modified_base 39: mod_base = OTHER; note = 2'-O-methyl modified nucleotide
  modified_base 40: mod_base = OTHER; note = 2'-O-methyl modified nucleotide
  modified_base 69: mod_base = OTHER; note = 2'-O-methyl modified nucleotide
  modified_base 70: mod_base = OTHER; note = 2'-O-methyl modified nucleotide
  modified_base 71: mod_base = OTHER; note = 2'-O-methyl modified nucleotide
  modified_base 72: mod_base = OTHER; note = 2'-O-methyl modified nucleotide
  modified_base 73: mod_base = OTHER; note = 2'-O-methyl modified nucleotide
  modified_base 74: mod_base = OTHER; note = 2'-O-methyl modified nucleotide
  modified_base 75: mod_base = OTHER; note = 2'-O-methyl modified nucleotide
  modified_base 76: mod_base = OTHER; note = 2'-O-methyl modified nucleotide
  modified_base 77: mod_base = OTHER; note = 2'-O-methyl modified nucleotide
  modified_base 78: mod_base = OTHER; note = 2'-O-methyl modified nucleotide
  modified_base 79: mod_base = OTHER; note = 2'-O-methyl modified nucleotide
  modified_base 80: mod_base = OTHER; note = 2'-O-methyl modified nucleotide
  modified_base 81: mod_base = OTHER; note = 2'-O-methyl modified nucleotide
  modified_base 82: mod_base = OTHER; note = 2'-O-methyl modified nucleotide
  modified_base 83: mod_base = OTHER; note = 2'-O-methyl modified nucleotide
  modified_base 84: mod_base = OTHER; note = 2'-O-methyl modified nucleotide
  modified_base 85: mod_base = OTHER; note = 2'-O-methyl modified nucleotide
  modified_base 86: mod_base = OTHER; note = 2'-O-methyl modified nucleotide
  modified_base 87: mod_base = OTHER; note = 2'-O-methyl modified nucleotide
  modified_base 88: mod_base = OTHER; note = 2'-O-methyl modified nucleotide
  modified_base 89: mod_base = OTHER; note = 2'-O-methyl modified nucleotide
  modified_base 90: mod_base = OTHER; note = 2'-O-methyl modified nucleotide
  modified_base 91: mod_base = OTHER; note = 2'-O-methyl modified nucleotide
  modified_base 92: mod_base = OTHER; note = 2'-O-methyl modified nucleotide
  modified_base 93: mod_base = OTHER; note = 2'-O-methyl modified nucleotide
  modified_base 94: mod_base = OTHER; note = 2'-O-methyl modified nucleotide
  modified_base 95: mod_base = OTHER; note = 2'-O-methyl modified nucleotide
  modified_base 96: mod_base = OTHER; note = 2'-O-methyl modified nucleotide
  modified_base 122: mod_base = OTHER; note = Nucleotide with phosphorothioate linkage
  modified_base 123: mod_base = OTHER; note = 2'-O-methyl modified nucleotide with phosphorothioate linkage
  modified_base 124: mod_base = OTHER; note = 2'-O-methyl modified nucleotide with phosphorothioate linkage
  modified_base 125: mod_base = OTHER; note = 2'-O-methyl modified nucleotide
gctggtacacggcagggtcagttttagagctagaaatagcaagttaaaataaggctagtccgttatcaacttgaaaaagtggcaccgagtcggtgcatccagaaccctagttgatgaccctgccg

SEQ ID NO: 16655 - RNA, 132 nt, synthetic construct
  source 1..132: mol_type = other RNA
  modified_base 1: mod_base = OTHER; note = 2'-O-methyl modified nucleotide with phosphorothioate linkage
  modified_base 2: mod_base = OTHER; note = 2'-O-methyl modified nucleotide with phosphorothioate linkage
  modified_base 3: mod_base = OTHER; note = 2'-O-methyl modified nucleotide with phosphorothioate linkage
  modified_base 29: mod_base = OTHER; note = 2'-O-methyl modified nucleotide
  modified_base 30: mod_base = OTHER; note = 2'-O-methyl modified nucleotide
  modified_base 31: mod_base = OTHER; note = 2'-O-methyl modified nucleotide
  modified_base 32: mod_base = OTHER; note = 2'-O-methyl modified nucleotide
  modified_base 33: mod_base = OTHER; note = 2'-O-methyl modified nucleotide
  modified_base 34: mod_base = OTHER; note = 2'-O-methyl modified nucleotide
  modified_base 35: mod_base = OTHER; note = 2'-O-methyl modified nucleotide
  modified_base 36: mod_base = OTHER; note = 2'-O-methyl modified nucleotide
  modified_base 37: mod_base = OTHER; note = 2'-O-methyl modified nucleotide
  modified_base 38: mod_base = OTHER; note = 2'-O-methyl modified nucleotide
  modified_base 39: mod_base = OTHER; note = 2'-O-methyl modified nucleotide
  modified_base 40: mod_base = OTHER; note = 2'-O-methyl modified nucleotide
  modified_base 69: mod_base = OTHER; note = 2'-O-methyl modified nucleotide
  modified_base 70: mod_base = OTHER; note = 2'-O-methyl modified nucleotide
  modified_base 71: mod_base = OTHER; note = 2'-O-methyl modified nucleotide
  modified_base 72: mod_base = OTHER; note = 2'-O-methyl modified nucleotide
  modified_base 73: mod_base = OTHER; note = 2'-O-methyl modified nucleotide
  modified_base 74: mod_base = OTHER; note = 2'-O-methyl modified nucleotide
  modified_base 75: mod_base = OTHER; note = 2'-O-methyl modified nucleotide
  modified_base 76: mod_base = OTHER; note = 2'-O-methyl modified nucleotide
  modified_base 77: mod_base = OTHER; note = 2'-O-methyl modified nucleotide
  modified_base 78: mod_base = OTHER; note = 2'-O-methyl modified nucleotide
  modified_base 79: mod_base = OTHER; note = 2'-O-methyl modified nucleotide
  modified_base 80: mod_base = OTHER; note = 2'-O-methyl modified nucleotide
  modified_base 81: mod_base = OTHER; note = 2'-O-methyl modified nucleotide
  modified_base 82: mod_base = OTHER; note = 2'-O-methyl modified nucleotide
  modified_base 83: mod_base = OTHER; note = 2'-O-methyl modified nucleotide
  modified_base 84: mod_base = OTHER; note = 2'-O-methyl modified nucleotide
  modified_base 85: mod_base = OTHER; note = 2'-O-methyl modified nucleotide
  modified_base 86: mod_base = OTHER; note = 2'-O-methyl modified nucleotide
  modified_base 87: mod_base = OTHER; note = 2'-O-methyl modified nucleotide
  modified_base 88: mod_base = OTHER; note = 2'-O-methyl modified nucleotide
  modified_base 89: mod_base = OTHER; note = 2'-O-methyl modified nucleotide
  modified_base 90: mod_base = OTHER; note = 2'-O-methyl modified nucleotide
  modified_base 91: mod_base = OTHER; note = 2'-O-methyl modified nucleotide
  modified_base 92: mod_base = OTHER; note = 2'-O-methyl modified nucleotide
  modified_base 93: mod_base = OTHER; note = 2'-O-methyl modified nucleotide
  modified_base 94: mod_base = OTHER; note = 2'-O-methyl modified nucleotide
  modified_base 95: mod_base = OTHER; note = 2'-O-methyl modified nucleotide
  modified_base 96: mod_base = OTHER; note = 2'-O-methyl modified nucleotide
  modified_base 129: mod_base = OTHER; note = Nucleotide with phosphorothioate linkage
  modified_base 130: mod_base = OTHER; note = 2'-O-methyl modified nucleotide with phosphorothioate linkage
  modified_base 131: mod_base = OTHER; note = 2'-O-methyl modified nucleotide with phosphorothioate linkage
  modified_base 132: mod_base = OTHER; note = 2'-O-methyl modified nucleotide
gctggtacacggcagggtcagttttagagctagaaatagcaagttaaaataaggctagtccgttatcaacttgaaaaagtggcaccgagtcggtgcatatccagaaccctagttgatgaccctgccgtgtac

SEQ ID NO: 16656 - RNA, 131 nt, synthetic construct
  source 1..131: mol_type = other RNA
  modified_base 1: mod_base = OTHER; note = 2'-O-methyl modified nucleotide with phosphorothioate linkage
  modified_base 2: mod_base = OTHER; note = 2'-O-methyl modified nucleotide with phosphorothioate linkage
  modified_base 3: mod_base = OTHER; note = 2'-O-methyl modified nucleotide with phosphorothioate linkage
  modified_base 29: mod_base = OTHER; note = 2'-O-methyl modified nucleotide
  modified_base 30: mod_base = OTHER; note = 2'-O-methyl modified nucleotide
  modified_base 31: mod_base = OTHER; note = 2'-O-methyl modified nucleotide
  modified_base 32: mod_base = OTHER; note = 2'-O-methyl modified nucleotide
  modified_base 33: mod_base = OTHER; note = 2'-O-methyl modified nucleotide
  modified_base 34: mod_base = OTHER; note = 2'-O-methyl modified nucleotide
  modified_base 35: mod_base = OTHER; note = 2'-O-methyl modified nucleotide
  modified_base 36: mod_base = OTHER; note = 2'-O-methyl modified nucleotide
  modified_base 37: mod_base = OTHER; note = 2'-O-methyl modified nucleotide
  modified_base 38: mod_base = OTHER; note = 2'-O-methyl modified nucleotide
  modified_base 39: mod_base = OTHER; note = 2'-O-methyl modified nucleotide
  modified_base 40: mod_base = OTHER; note = 2'-O-methyl modified nucleotide
  modified_base 69: mod_base = OTHER; note = 2'-O-methyl modified nucleotide
  modified_base 70: mod_base = OTHER; note = 2'-O-methyl modified nucleotide
  modified_base 71: mod_base = OTHER; note = 2'-O-methyl modified nucleotide
  modified_base 72: mod_base = OTHER; note = 2'-O-methyl modified nucleotide
  modified_base 73: mod_base = OTHER; note = 2'-O-methyl modified nucleotide
  modified_base 74: mod_base = OTHER; note = 2'-O-methyl modified nucleotide
  modified_base 75: mod_base = OTHER; note = 2'-O-methyl modified nucleotide
  modified_base 76: mod_base = OTHER; note = 2'-O-methyl modified nucleotide
  modified_base 77: mod_base = OTHER; note = 2'-O-methyl modified nucleotide
  modified_base 78: mod_base = OTHER; note = 2'-O-methyl modified nucleotide
  modified_base 79: mod_base = OTHER; note = 2'-O-methyl modified nucleotide
  modified_base 80: mod_base = OTHER; note = 2'-O-methyl modified nucleotide
  modified_base 81: mod_base = OTHER; note = 2'-O-methyl modified nucleotide
  modified_base 82: mod_base = OTHER; note = 2'-O-methyl modified nucleotide
  modified_base 83: mod_base = OTHER; note = 2'-O-methyl modified nucleotide
  modified_base 84: mod_base = OTHER; note = 2'-O-methyl modified nucleotide
  modified_base 85: mod_base = OTHER; note = 2'-O-methyl modified nucleotide
  modified_base 86: mod_base = OTHER; note = 2'-O-methyl modified nucleotide
  modified_base 87: mod_base = OTHER; note = 2'-O-methyl modified nucleotide
  modified_base 88: mod_base = OTHER; note = 2'-O-methyl modified nucleotide
  modified_base 89: mod_base = OTHER; note = 2'-O-methyl modified nucleotide
  modified_base 90: mod_base = OTHER; note = 2'-O-methyl modified nucleotide
  modified_base 91: mod_base = OTHER; note = 2'-O-methyl modified nucleotide
  modified_base 92: mod_base = OTHER; note = 2'-O-methyl modified nucleotide
  modified_base 93: mod_base = OTHER; note = 2'-O-methyl modified nucleotide
  modified_base 94: mod_base = OTHER; note = 2'-O-methyl modified nucleotide
  modified_base 95: mod_base = OTHER; note = 2'-O-methyl modified nucleotide
  modified_base 96: mod_base = OTHER; note = 2'-O-methyl modified nucleotide
  modified_base 128: mod_base = OTHER; note = Nucleotide with phosphorothioate linkage
  modified_base 129: mod_base = OTHER; note = 2'-O-methyl modified nucleotide with phosphorothioate linkage
  modified_base 130: mod_base = OTHER; note = 2'-O-methyl modified nucleotide with phosphorothioate linkage
  modified_base 131: mod_base = OTHER; note = 2'-O-methyl modified nucleotide
gctggtacacggcagggtcagttttagagctagaaatagcaagttaaaataaggctagtccgttatcaacttgaaaaagtggcaccgagtcggtgcatatccagaaccctagttgatgaccctgccgtgta

SEQ ID NO: 16657 - RNA, 130 nt, synthetic construct
  source 1..130: mol_type = other RNA
  modified_base 1: mod_base = OTHER; note = 2'-O-methyl modified nucleotide with phosphorothioate linkage
  modified_base 2: mod_base = OTHER; note = 2'-O-methyl modified nucleotide with phosphorothioate linkage
  modified_base 3: mod_base = OTHER; note = 2'-O-methyl modified nucleotide with phosphorothioate linkage
  modified_base 29: mod_base = OTHER; note = 2'-O-methyl modified nucleotide
  modified_base 30: mod_base = OTHER; note = 2'-O-methyl modified nucleotide
  modified_base 31: mod_base = OTHER; note = 2'-O-methyl modified nucleotide
  modified_base 32: mod_base = OTHER; note = 2'-O-methyl modified nucleotide
  modified_base 33: mod_base = OTHER; note = 2'-O-methyl modified nucleotide
  modified_base 34: mod_base = OTHER; note = 2'-O-methyl modified nucleotide
  modified_base 35: mod_base = OTHER; note = 2'-O-methyl modified nucleotide
  modified_base 36: mod_base = OTHER; note = 2'-O-methyl modified nucleotide
  modified_base 37: mod_base = OTHER; note = 2'-O-methyl modified nucleotide
  modified_base 38: mod_base = OTHER; note = 2'-O-methyl modified nucleotide
  modified_base 39: mod_base = OTHER; note = 2'-O-methyl modified nucleotide
  modified_base 40: mod_base = OTHER; note = 2'-O-methyl modified nucleotide
  modified_base 69: mod_base = OTHER; note = 2'-O-methyl modified nucleotide
  modified_base 70: mod_base = OTHER; note = 2'-O-methyl modified nucleotide
  modified_base 71: mod_base = OTHER; note = 2'-O-methyl modified nucleotide
  modified_base 72: mod_base = OTHER; note = 2'-O-methyl modified nucleotide
  modified_base 73: mod_base = OTHER; note = 2'-O-methyl modified nucleotide
  modified_base 74: mod_base = OTHER; note = 2'-O-methyl modified nucleotide
  modified_base 75: mod_base = OTHER; note = 2'-O-methyl modified nucleotide
  modified_base 76: mod_base = OTHER; note = 2'-O-methyl modified nucleotide
  modified_base 77: mod_base = OTHER; note = 2'-O-methyl modified nucleotide
  modified_base 78: mod_base = OTHER; note = 2'-O-methyl modified nucleotide
  modified_base 79: mod_base = OTHER; note = 2'-O-methyl modified nucleotide
  modified_base 80: mod_base = OTHER; note = 2'-O-methyl modified nucleotide
  modified_base 81: mod_base = OTHER; note = 2'-O-methyl modified nucleotide
  modified_base 82: mod_base = OTHER; note = 2'-O-methyl modified nucleotide
  modified_base 83: mod_base = OTHER; note = 2'-O-methyl modified nucleotide
  modified_base 84: mod_base = OTHER; note = 2'-O-methyl modified nucleotide
  modified_base 85: mod_base = OTHER; note = 2'-O-methyl modified nucleotide
  modified_base 86: mod_base = OTHER; note = 2'-O-methyl modified nucleotide
  modified_base 87: mod_base = OTHER; note = 2'-O-methyl modified nucleotide
  modified_base 88: mod_base = OTHER; note = 2'-O-methyl modified nucleotide
  modified_base 89: mod_base = OTHER; note = 2'-O-methyl modified nucleotide
  modified_base 90: mod_base = OTHER; note = 2'-O-methyl modified nucleotide
  modified_base 91: mod_base = OTHER; note = 2'-O-methyl modified nucleotide
  modified_base 92: mod_base = OTHER; note = 2'-O-methyl modified nucleotide
  modified_base 93: mod_base = OTHER; note = 2'-O-methyl modified nucleotide
  modified_base 94: mod_base = OTHER; note = 2'-O-methyl modified nucleotide
  modified_base 95: mod_base = OTHER; note = 2'-O-methyl modified nucleotide
  modified_base 96: mod_base = OTHER; note = 2'-O-methyl modified nucleotide
  modified_base 127: mod_base = OTHER; note = Nucleotide with phosphorothioate linkage
  modified_base 128: mod_base = OTHER; note = 2'-O-methyl modified nucleotide with phosphorothioate linkage
  modified_base 129: mod_base = OTHER; note = 2'-O-methyl modified nucleotide with phosphorothioate linkage
  modified_base 130: mod_base = OTHER; note = 2'-O-methyl modified nucleotide
gctggtacacggcagggtcagttttagagctagaaatagcaagttaaaataaggctagtccgttatcaacttgaaaaagtggcaccgagtcggtgcatatccagaaccctagttgatgaccctgccgtgt

SEQ ID NO: 16658 - RNA, 129 nt, synthetic construct
  source 1..129: mol_type = other RNA
  modified_base 1: mod_base = OTHER; note = 2'-O-methyl modified nucleotide with phosphorothioate linkage
  modified_base 2: mod_base = OTHER; note = 2'-O-methyl modified nucleotide with phosphorothioate linkage
  modified_base 3: mod_base = OTHER; note = 2'-O-methyl modified nucleotide with phosphorothioate linkage
  modified_base 29: mod_base = OTHER; note = 2'-O-methyl modified nucleotide
  modified_base 30: mod_base = OTHER; note = 2'-O-methyl modified nucleotide
  modified_base 31: mod_base = OTHER; note = 2'-O-methyl modified nucleotide
  modified_base 32: mod_base = OTHER; note = 2'-O-methyl modified nucleotide
  modified_base 33: mod_base = OTHER; note = 2'-O-methyl modified nucleotide
  modified_base 34: mod_base = OTHER; note = 2'-O-methyl modified nucleotide
  modified_base 35: mod_base = OTHER; note = 2'-O-methyl modified nucleotide
  modified_base 36: mod_base = OTHER; note = 2'-O-methyl modified nucleotide
  modified_base 37: mod_base = OTHER; note = 2'-O-methyl modified nucleotide
  modified_base 38: mod_base = OTHER; note = 2'-O-methyl modified nucleotide
  modified_base 39: mod_base = OTHER; note = 2'-O-methyl modified nucleotide
  modified_base 40: mod_base = OTHER; note = 2'-O-methyl modified nucleotide
  modified_base 69: mod_base = OTHER; note = 2'-O-methyl modified nucleotide
  modified_base 70: mod_base = OTHER; note = 2'-O-methyl modified nucleotide
  modified_base 71: mod_base = OTHER; note = 2'-O-methyl modified nucleotide
  modified_base 72: mod_base = OTHER; note = 2'-O-methyl modified nucleotide
  modified_base 73: mod_base = OTHER; note = 2'-O-methyl modified nucleotide
  modified_base 74: mod_base = OTHER; note = 2'-O-methyl modified nucleotide
  modified_base 75: mod_base = OTHER; note = 2'-O-methyl modified nucleotide
  modified_base 76: mod_base = OTHER; note = 2'-O-methyl modified nucleotide
  modified_base 77: mod_base = OTHER; note = 2'-O-methyl modified nucleotide
  modified_base 78: mod_base = OTHER; note = 2'-O-methyl modified nucleotide
  modified_base 79: mod_base = OTHER; note = 2'-O-methyl modified nucleotide
  modified_base 80: mod_base = OTHER; note = 2'-O-methyl modified nucleotide
  modified_base 81: mod_base = OTHER; note = 2'-O-methyl modified nucleotide
  modified_base 82: mod_base = OTHER; note = 2'-O-methyl modified nucleotide
  modified_base 83: mod_base = OTHER; note = 2'-O-methyl modified nucleotide
  modified_base 84: mod_base = OTHER; note = 2'-O-methyl modified nucleotide
  modified_base 85: mod_base = OTHER; note = 2'-O-methyl modified nucleotide
  modified_base 86: mod_base = OTHER; note = 2'-O-methyl modified nucleotide
  modified_base 87: mod_base = OTHER; note = 2'-O-methyl modified nucleotide
  modified_base 88: mod_base = OTHER; note = 2'-O-methyl modified nucleotide
  modified_base 89: mod_base = OTHER; note = 2'-O-methyl modified nucleotide
  modified_base 90: mod_base = OTHER; note = 2'-O-methyl modified nucleotide
  modified_base 91: mod_base = OTHER; note = 2'-O-methyl modified nucleotide
  modified_base 92: mod_base = OTHER; note = 2'-O-methyl modified nucleotide
  modified_base 93: mod_base = OTHER; note = 2'-O-methyl modified nucleotide
  modified_base 94: mod_base = OTHER; note = 2'-O-methyl modified nucleotide
  modified_base 95: mod_base = OTHER; note = 2'-O-methyl modified nucleotide
  modified_base 96: mod_base = OTHER; note = 2'-O-methyl modified nucleotide
  modified_base 126: mod_base = OTHER; note = Nucleotide with phosphorothioate linkage
  modified_base 127: mod_base = OTHER; note = 2'-O-methyl modified nucleotide with phosphorothioate linkage
  modified_base 128: mod_base = OTHER; note = 2'-O-methyl modified nucleotide with phosphorothioate linkage
  modified_base 129: mod_base = OTHER; note = 2'-O-methyl modified nucleotide
gctggtacacggcagggtcagttttagagctagaaatagcaagttaaaataaggctagtccgttatcaacttgaaaaagtggcaccgagtcggtgcatatccagaaccctagttgatgaccctgccgtg

SEQ ID NO: 16659 - RNA, 128 nt, synthetic construct
  source 1..128: mol_type = other RNA
  modified_base 1: mod_base = OTHER; note = 2'-O-methyl modified nucleotide with phosphorothioate linkage
  modified_base 2: mod_base = OTHER; note = 2'-O-methyl modified nucleotide with phosphorothioate linkage
  modified_base 3: mod_base = OTHER; note = 2'-O-methyl modified nucleotide with phosphorothioate linkage
  modified_base 29: mod_base = OTHER; note = 2'-O-methyl modified nucleotide
  modified_base 30: mod_base = OTHER; note = 2'-O-methyl modified nucleotide
  modified_base 31: mod_base = OTHER; note = 2'-O-methyl modified nucleotide
  modified_base 32: mod_base = OTHER; note = 2'-O-methyl modified nucleotide
  modified_base 33: mod_base = OTHER; note = 2'-O-methyl modified nucleotide
  modified_base 34: mod_base = OTHER; note = 2'-O-methyl modified nucleotide
  modified_base 35: mod_base = OTHER; note = 2'-O-methyl modified nucleotide
  modified_base 36: mod_base = OTHER; note = 2'-O-methyl modified nucleotide
  modified_base 37: mod_base = OTHER; note = 2'-O-methyl modified nucleotide
  modified_base 38: mod_base = OTHER; note = 2'-O-methyl modified nucleotide
  modified_base 39: mod_base = OTHER; note = 2'-O-methyl modified nucleotide
  modified_base 40: mod_base = OTHER; note = 2'-O-methyl modified nucleotide
  modified_base 69: mod_base = OTHER; note = 2'-O-methyl modified nucleotide
  modified_base 70: mod_base = OTHER; note = 2'-O-methyl modified nucleotide
  modified_base 71: mod_base = OTHER; note = 2'-O-methyl modified nucleotide
  modified_base 72: mod_base = OTHER; note = 2'-O-methyl modified nucleotide
  modified_base 73: mod_base = OTHER; note = 2'-O-methyl modified nucleotide
  modified_base 74: mod_base = OTHER; note = 2'-O-methyl modified nucleotide
  modified_base 75: mod_base = OTHER; note = 2'-O-methyl modified nucleotide
  modified_base 76: mod_base = OTHER; note = 2'-O-methyl modified nucleotide
  modified_base 77: mod_base = OTHER; note = 2'-O-methyl modified nucleotide
  modified_base 78: mod_base = OTHER; note = 2'-O-methyl modified nucleotide
  modified_base 79: mod_base = OTHER; note = 2'-O-methyl modified nucleotide
  modified_base 80: mod_base = OTHER; note = 2'-O-methyl modified nucleotide
  modified_base 81: mod_base = OTHER; note = 2'-O-methyl modified nucleotide
  modified_base 82: mod_base = OTHER; note = 2'-O-methyl modified nucleotide
  modified_base 83: mod_base = OTHER; note = 2'-O-methyl modified nucleotide
  modified_base 84: mod_base = OTHER; note = 2'-O-methyl modified nucleotide
  modified_base 85: mod_base = OTHER; note = 2'-O-methyl modified nucleotide
  modified_base 86: mod_base = OTHER; note = 2'-O-methyl modified nucleotide
  modified_base 87: mod_base = OTHER; note = 2'-O-methyl modified nucleotide
  modified_base 88: mod_base = OTHER; note = 2'-O-methyl modified nucleotide
  modified_base 89: mod_base = OTHER; note = 2'-O-methyl modified nucleotide
  modified_base 90: mod_base = OTHER; note = 2'-O-methyl modified nucleotide
  modified_base 91: mod_base = OTHER; note = 2'-O-methyl modified nucleotide
  modified_base 92: mod_base = OTHER; note = 2'-O-methyl modified nucleotide
  modified_base 93: mod_base = OTHER; note = 2'-O-methyl modified nucleotide
  modified_base 94: mod_base = OTHER; note = 2'-O-methyl modified nucleotide
  modified_base 95: mod_base = OTHER; note = 2'-O-methyl modified nucleotide
  modified_base 96: mod_base = OTHER; note = 2'-O-methyl modified nucleotide
  modified_base 125: mod_base = OTHER; note = Nucleotide with phosphorothioate linkage
  modified_base 126: mod_base = OTHER; note = 2'-O-methyl modified nucleotide with phosphorothioate linkage
  modified_base 127: mod_base = OTHER; note = 2'-O-methyl modified nucleotide with phosphorothioate linkage
  modified_base 128: mod_base = OTHER; note = 2'-O-methyl modified nucleotide
gctggtacacggcagggtcagttttagagctagaaatagcaagttaaaataaggctagtccgttatcaacttgaaaaagtggcaccgagtcggtgcatatccagaaccctagttgatgaccctgccgt

SEQ ID NO: 16660 - RNA, 127 nt, synthetic construct
  source 1..127: mol_type = other RNA
  modified_base 1: mod_base = OTHER; note = 2'-O-methyl modified nucleotide with phosphorothioate linkage
  modified_base 2: mod_base = OTHER; note = 2'-O-methyl modified nucleotide with phosphorothioate linkage
  modified_base 3: mod_base = OTHER; note = 2'-O-methyl modified nucleotide with phosphorothioate linkage
  modified_base 29: mod_base = OTHER; note = 2'-O-methyl modified nucleotide
  modified_base 30: mod_base = OTHER; note = 2'-O-methyl modified nucleotide
  modified_base 31: mod_base = OTHER; note = 2'-O-methyl modified nucleotide
  modified_base 32: mod_base = OTHER; note = 2'-O-methyl modified nucleotide
  modified_base 33: mod_base = OTHER; note = 2'-O-methyl modified nucleotide
  modified_base 34: mod_base = OTHER; note = 2'-O-methyl modified nucleotide
  modified_base 35: mod_base = OTHER; note = 2'-O-methyl modified nucleotide
  modified_base 36: mod_base = OTHER; note = 2'-O-methyl modified nucleotide
  modified_base 37: mod_base = OTHER; note = 2'-O-methyl modified nucleotide
  modified_base 38: mod_base = OTHER; note = 2'-O-methyl modified nucleotide
  modified_base 39: mod_base = OTHER; note = 2'-O-methyl modified nucleotide
  modified_base 40: mod_base = OTHER; note = 2'-O-methyl modified nucleotide
  modified_base 69: mod_base = OTHER; note = 2'-O-methyl modified nucleotide
  modified_base 70: mod_base = OTHER; note = 2'-O-methyl modified nucleotide
  modified_base 71: mod_base = OTHER; note = 2'-O-methyl modified nucleotide
  modified_base 72: mod_base = OTHER; note = 2'-O-methyl modified nucleotide
  modified_base 73: mod_base = OTHER; note = 2'-O-methyl modified nucleotide
  modified_base 74: mod_base = OTHER; note = 2'-O-methyl modified nucleotide
  modified_base 75: mod_base = OTHER; note = 2'-O-methyl modified nucleotide
  modified_base 76: mod_base = OTHER; note = 2'-O-methyl modified nucleotide
  modified_base 77: mod_base = OTHER; note = 2'-O-methyl modified nucleotide
  modified_base 78: mod_base = OTHER; note = 2'-O-methyl modified nucleotide
  modified_base 79: mod_base = OTHER; note = 2'-O-methyl modified nucleotide
  modified_base 80: mod_base = OTHER; note = 2'-O-methyl modified nucleotide
  modified_base 81: mod_base = OTHER; note = 2'-O-methyl modified nucleotide
  modified_base 82: mod_base = OTHER; note = 2'-O-methyl modified nucleotide
  modified_base 83: mod_base = OTHER; note = 2'-O-methyl modified nucleotide
  modified_base 84: mod_base = OTHER; note = 2'-O-methyl modified nucleotide
  modified_base 85: mod_base = OTHER; note = 2'-O-methyl modified nucleotide
  modified_base 86: mod_base = OTHER; note = 2'-O-methyl modified nucleotide
  modified_base 87: mod_base = OTHER; note = 2'-O-methyl modified nucleotide
  modified_base 88: mod_base = OTHER; note = 2'-O-methyl modified nucleotide
  modified_base 89: mod_base = OTHER; note = 2'-O-methyl modified nucleotide
  modified_base 90: mod_base = OTHER; note = 2'-O-methyl modified nucleotide
  modified_base 91: mod_base = OTHER; note = 2'-O-methyl modified nucleotide
  modified_base 92: mod_base = OTHER; note = 2'-O-methyl modified nucleotide
  modified_base 93: mod_base = OTHER; note = 2'-O-methyl modified nucleotide
  modified_base 94: mod_base = OTHER; note = 2'-O-methyl modified nucleotide
  modified_base 95: mod_base = OTHER; note = 2'-O-methyl modified nucleotide
  modified_base 96: mod_base = OTHER; note = 2'-O-methyl modified nucleotide
  modified_base 124: mod_base = OTHER; note = Nucleotide with phosphorothioate linkage
  modified_base 125: mod_base = OTHER; note = 2'-O-methyl modified nucleotide with phosphorothioate linkage
  modified_base 126: mod_base = OTHER; note = 2'-O-methyl modified nucleotide with phosphorothioate linkage
  modified_base 127: mod_base = OTHER; note = 2'-O-methyl modified nucleotide
gctggtacacggcagggtcagttttagagctagaaatagcaagttaaaataaggctagtccgttatcaacttgaaaaagtggcaccgagtcggtgcatatccagaaccctagttgatgaccctgccg

SEQ ID NO: 16661 - RNA, 134 nt, synthetic construct
  source 1..134: mol_type = other RNA
  modified_base 1: mod_base = OTHER; note = 2'-O-methyl modified nucleotide with phosphorothioate linkage
  modified_base 2: mod_base = OTHER; note = 2'-O-methyl modified nucleotide with phosphorothioate linkage
  modified_base 3: mod_base = OTHER; note = 2'-O-methyl modified nucleotide with phosphorothioate linkage
  modified_base 29: mod_base = OTHER; note = 2'-O-methyl modified nucleotide
  modified_base 30: mod_base = OTHER; note = 2'-O-methyl modified nucleotide
  modified_base 31: mod_base = OTHER; note = 2'-O-methyl modified nucleotide
  modified_base 32: mod_base = OTHER; note = 2'-O-methyl modified nucleotide
  modified_base 33: mod_base = OTHER; note = 2'-O-methyl modified nucleotide
  modified_base 34: mod_base = OTHER; note = 2'-O-methyl modified nucleotide
  modified_base 35: mod_base = OTHER; note = 2'-O-methyl modified nucleotide
  modified_base 36: mod_base = OTHER; note = 2'-O-methyl modified nucleotide
  modified_base 37: mod_base = OTHER; note = 2'-O-methyl modified nucleotide
  modified_base 38: mod_base = OTHER; note = 2'-O-methyl modified nucleotide
  modified_base 39: mod_base = OTHER; note = 2'-O-methyl modified nucleotide
  modified_base 40: mod_base = OTHER; note = 2'-O-methyl modified nucleotide
  modified_base 69: mod_base = OTHER; note = 2'-O-methyl modified nucleotide
  modified_base 70: mod_base = OTHER; note = 2'-O-methyl modified nucleotide
  modified_base 71: mod_base = OTHER; note = 2'-O-methyl modified nucleotide
  modified_base 72: mod_base = OTHER; note = 2'-O-methyl modified nucleotide
  modified_base 73: mod_base = OTHER; note = 2'-O-methyl modified nucleotide
  modified_base 74: mod_base = OTHER; note = 2'-O-methyl modified nucleotide
  modified_base 75: mod_base = OTHER; note = 2'-O-methyl modified nucleotide
  modified_base 76: mod_base = OTHER; note = 2'-O-methyl modified nucleotide
  modified_base 77: mod_base = OTHER; note = 2'-O-methyl modified nucleotide
  modified_base 78: mod_base = OTHER; note = 2'-O-methyl modified nucleotide
  modified_base 79: mod_base = OTHER; note = 2'-O-methyl modified nucleotide
  modified_base 80: mod_base = OTHER; note = 2'-O-methyl modified nucleotide
  modified_base 81: mod_base = OTHER; note = 2'-O-methyl modified nucleotide
  modified_base 82: mod_base = OTHER; note = 2'-O-methyl modified nucleotide
  modified_base 83: mod_base = OTHER; note = 2'-O-methyl modified nucleotide
  modified_base 84: mod_base = OTHER; note = 2'-O-methyl modified nucleotide
  modified_base 85: mod_base = OTHER; note = 2'-O-methyl modified nucleotide
  modified_base 86: mod_base = OTHER; note = 2'-O-methyl modified nucleotide
  modified_base 87: mod_base = OTHER; note = 2'-O-methyl modified nucleotide
  modified_base 88: mod_base = OTHER; note = 2'-O-methyl modified nucleotide
  modified_base 89: mod_base = OTHER; note = 2'-O-methyl modified nucleotide
  modified_base 90: mod_base = OTHER; note = 2'-O-methyl modified nucleotide
  modified_base 91: mod_base = OTHER; note = 2'-O-methyl modified nucleotide
  modified_base 92: mod_base = OTHER; note = 2'-O-methyl modified nucleotide
  modified_base 93: mod_base = OTHER; note = 2'-O-methyl modified nucleotide
  modified_base 94: mod_base = OTHER; note = 2'-O-methyl modified nucleotide
  modified_base 95: mod_base = OTHER; note = 2'-O-methyl modified nucleotide
  modified_base 96: mod_base = OTHER; note = 2'-O-methyl modified nucleotide
  modified_base 131: mod_base = OTHER; note = Nucleotide with phosphorothioate linkage
  modified_base 132: mod_base = OTHER; note = 2'-O-methyl modified nucleotide with phosphorothioate linkage
  modified_base 133: mod_base = OTHER; note = 2'-O-methyl modified nucleotide with phosphorothioate linkage
  modified_base 134: mod_base = OTHER; note = 2'-O-methyl modified nucleotide
gctggtacacggcagggtcagttttagagctagaaatagcaagttaaaataaggctagtccgttatcaacttgaaaaagtggcaccgagtcggtgcagatatccagaaccctagttgatgaccctgccgtgtac

SEQ ID NO: 16662 - RNA, 133 nt, synthetic construct
  source 1..133: mol_type = other RNA
  modified_base 1: mod_base = OTHER; note = 2'-O-methyl modified nucleotide with phosphorothioate linkage
  modified_base 2: mod_base = OTHER; note = 2'-O-methyl modified nucleotide with phosphorothioate linkage
  modified_base 3: mod_base = OTHER; note = 2'-O-methyl modified nucleotide with phosphorothioate linkage
  modified_base 29: mod_base = OTHER; note = 2'-O-methyl modified nucleotide
  modified_base 30: mod_base = OTHER; note = 2'-O-methyl modified nucleotide
  modified_base 31: mod_base = OTHER; note = 2'-O-methyl modified nucleotide
  modified_base 32: mod_base = OTHER; note = 2'-O-methyl modified nucleotide
  modified_base 33: mod_base = OTHER; note = 2'-O-methyl modified nucleotide
  modified_base 34: mod_base = OTHER; note = 2'-O-methyl modified nucleotide
  modified_base 35: mod_base = OTHER; note = 2'-O-methyl modified nucleotide
  modified_base 36: mod_base = OTHER; note = 2'-O-methyl modified nucleotide
  modified_base 37: mod_base = OTHER; note = 2'-O-methyl modified nucleotide
  modified_base 38: mod_base = OTHER; note = 2'-O-methyl modified nucleotide
  modified_base 39: mod_base = OTHER; note = 2'-O-methyl modified nucleotide
  modified_base 40: mod_base = OTHER; note = 2'-O-methyl modified nucleotide
  modified_base 69: mod_base = OTHER; note = 2'-O-methyl modified nucleotide
  modified_base 70: mod_base = OTHER; note = 2'-O-methyl modified nucleotide
  modified_base 71: mod_base = OTHER; note = 2'-O-methyl modified nucleotide
  modified_base 72: mod_base = OTHER; note = 2'-O-methyl modified nucleotide
  modified_base 73: mod_base = OTHER; note = 2'-O-methyl modified nucleotide
  modified_base 74: mod_base = OTHER; note = 2'-O-methyl modified nucleotide
  modified_base 75: mod_base = OTHER; note = 2'-O-methyl modified nucleotide
  modified_base 76: mod_base = OTHER; note = 2'-O-methyl modified nucleotide
  modified_base 77: mod_base = OTHER; note = 2'-O-methyl modified nucleotide
  modified_base 78: mod_base = OTHER; note = 2'-O-methyl modified nucleotide
  modified_base 79: mod_base = OTHER; note = 2'-O-methyl modified nucleotide
  modified_base 80: mod_base = OTHER; note = 2'-O-methyl modified nucleotide
  modified_base 81: mod_base = OTHER; note = 2'-O-methyl modified nucleotide
  modified_base 82: mod_base = OTHER; note = 2'-O-methyl modified nucleotide
  modified_base 83: mod_base = OTHER; note = 2'-O-methyl modified nucleotide
  modified_base 84: mod_base = OTHER; note = 2'-O-methyl modified nucleotide
  modified_base 85: mod_base = OTHER; note = 2'-O-methyl modified nucleotide
  modified_base 86: mod_base = OTHER; note = 2'-O-methyl modified nucleotide
  modified_base 87: mod_base = OTHER; note = 2'-O-methyl modified nucleotide
  modified_base 88: mod_base = OTHER; note = 2'-O-methyl modified nucleotide
  modified_base 89: mod_base = OTHER; note = 2'-O-methyl modified nucleotide
  modified_base 90: mod_base = OTHER; note = 2'-O-methyl modified nucleotide
  modified_base 91: mod_base = OTHER; note = 2'-O-methyl modified nucleotide
  modified_base 92: mod_base = OTHER; note = 2'-O-methyl modified nucleotide
  modified_base 93: mod_base = OTHER; note = 2'-O-methyl modified nucleotide
  modified_base 94: mod_base = OTHER; note = 2'-O-methyl modified nucleotide
  modified_base 95: mod_base = OTHER; note = 2'-O-methyl modified nucleotide
  modified_base 96: mod_base = OTHER; note = 2'-O-methyl modified nucleotide
  modified_base 130: mod_base = OTHER; note = Nucleotide with phosphorothioate linkage
  modified_base 131: mod_base = OTHER; note = 2'-O-methyl modified nucleotide with phosphorothioate linkage
  modified_base 132: mod_base = OTHER; note = 2'-O-methyl modified nucleotide with phosphorothioate linkage
  modified_base 133: mod_base = OTHER; note = 2'-O-methyl modified nucleotide
gctggtacacggcagggtcagttttagagctagaaatagcaagttaaaataaggctagtccgttatcaacttgaaaaagtggcaccgagtcggtgcagatatccagaaccctagttgatgaccctgccgtgta

SEQ ID NO: 16663 - RNA, 132 nt, synthetic construct
  source 1..132: mol_type = other RNA
  modified_base 1: mod_base = OTHER; note = 2'-O-methyl modified nucleotide with phosphorothioate linkage
  modified_base 2: mod_base = OTHER; note = 2'-O-methyl modified nucleotide with phosphorothioate linkage
  modified_base 3: mod_base = OTHER; note = 2'-O-methyl modified nucleotide with phosphorothioate linkage
  modified_base 29: mod_base = OTHER; note = 2'-O-methyl modified nucleotide
  modified_base 30: mod_base = OTHER; note = 2'-O-methyl modified nucleotide
  modified_base 31: mod_base = OTHER; note = 2'-O-methyl modified nucleotide
  modified_base 32: mod_base = OTHER; note = 2'-O-methyl modified nucleotide
  modified_base 33: mod_base = OTHER; note = 2'-O-methyl modified nucleotide
  modified_base 34: mod_base = OTHER; note = 2'-O-methyl modified nucleotide
  modified_base 35: mod_base = OTHER; note = 2'-O-methyl modified nucleotide
  modified_base 36: mod_base = OTHER; note = 2'-O-methyl modified nucleotide
  modified_base 37: mod_base = OTHER; note = 2'-O-methyl modified nucleotide
  modified_base 38: mod_base = OTHER; note = 2'-O-methyl modified nucleotide
  modified_base 39: mod_base = OTHER; note = 2'-O-methyl modified nucleotide
  modified_base 40: mod_base = OTHER; note = 2'-O-methyl modified nucleotide
  modified_base 69: mod_base = OTHER; note = 2'-O-methyl modified nucleotide
  modified_base 70: mod_base = OTHER; note = 2'-O-methyl modified nucleotide
  modified_base 71: mod_base = OTHER; note = 2'-O-methyl modified nucleotide
  modified_base 72: mod_base = OTHER; note = 2'-O-methyl modified nucleotide
  modified_base 73: mod_base = OTHER; note = 2'-O-methyl modified nucleotide
  modified_base 74: mod_base = OTHER; note = 2'-O-methyl modified nucleotide
  modified_base 75: mod_base = OTHER; note = 2'-O-methyl modified nucleotide
  modified_base 76: mod_base = OTHER; note = 2'-O-methyl modified nucleotide
  modified_base 77: mod_base = OTHER; note = 2'-O-methyl modified nucleotide
  modified_base 78: mod_base = OTHER; note = 2'-O-methyl modified nucleotide
  modified_base 79: mod_base = OTHER; note = 2'-O-methyl modified nucleotide
  modified_base 80: mod_base = OTHER; note = 2'-O-methyl modified nucleotide
  modified_base 81: mod_base = OTHER; note = 2'-O-methyl modified nucleotide
  modified_base 82: mod_base = OTHER; note = 2'-O-methyl modified nucleotide
  modified_base 83: mod_base = OTHER; note = 2'-O-methyl modified nucleotide
  modified_base 84: mod_base = OTHER; note = 2'-O-methyl modified nucleotide
  modified_base 85: mod_base = OTHER; note = 2'-O-methyl modified nucleotide
  modified_base 86: mod_base = OTHER; note = 2'-O-methyl modified nucleotide
  modified_base 87: mod_base = OTHER; note = 2'-O-methyl modified nucleotide
  modified_base 88: mod_base = OTHER; note = 2'-O-methyl modified nucleotide
  modified_base 89: mod_base = OTHER; note = 2'-O-methyl modified nucleotide
  modified_base 90: mod_base = OTHER; note = 2'-O-methyl modified nucleotide
  modified_base 91: mod_base = OTHER; note = 2'-O-methyl modified nucleotide
  modified_base 92: mod_base = OTHER; note = 2'-O-methyl modified nucleotide
  modified_base 93: mod_base = OTHER; note = 2'-O-methyl modified nucleotide
  modified_base 94: mod_base = OTHER; note = 2'-O-methyl modified nucleotide
  modified_base 95: mod_base = OTHER; note = 2'-O-methyl modified nucleotide
  modified_base 96: mod_base = OTHER; note = 2'-O-methyl modified nucleotide
  modified_base 129: mod_base = OTHER; note = Nucleotide with phosphorothioate linkage
  modified_base 130: mod_base = OTHER; note = 2'-O-methyl modified nucleotide with phosphorothioate linkage
  modified_base 131: mod_base = OTHER; note = 2'-O-methyl modified nucleotide with phosphorothioate linkage
  modified_base 132: mod_base = OTHER; note = 2'-O-methyl modified nucleotide
gctggtacacggcagggtcagttttagagctagaaatagcaagttaaaataaggctagtccgttatcaacttgaaaaagtggcaccgagtcggtgcagatatccagaaccctagttgatgaccctgccgtgt

SEQ ID NO: 16664 - RNA, 131 nt, synthetic construct
  source 1..131: mol_type = other RNA
  modified_base 1: mod_base = OTHER; note = 2'-O-methyl modified nucleotide with phosphorothioate linkage
  modified_base 2: mod_base = OTHER; note = 2'-O-methyl modified nucleotide with phosphorothioate linkage
  modified_base 3: mod_base = OTHER; note = 2'-O-methyl modified nucleotide with phosphorothioate linkage
  modified_base 29: mod_base = OTHER; note = 2'-O-methyl modified nucleotide
  modified_base 30: mod_base = OTHER; note = 2'-O-methyl modified nucleotide
  modified_base 31: mod_base = OTHER; note = 2'-O-methyl modified nucleotide
  modified_base 32: mod_base = OTHER; note = 2'-O-methyl modified nucleotide
  modified_base 33: mod_base = OTHER; note = 2'-O-methyl modified nucleotide
  modified_base 34: mod_base = OTHER; note = 2'-O-methyl modified nucleotide
  modified_base 35: mod_base = OTHER; note = 2'-O-methyl modified nucleotide
  modified_base 36: mod_base = OTHER; note = 2'-O-methyl modified nucleotide
  modified_base 37: mod_base = OTHER; note = 2'-O-methyl modified nucleotide
  modified_base 38: mod_base = OTHER; note = 2'-O-methyl modified nucleotide
  modified_base 39: mod_base = OTHER; note = 2'-O-methyl modified nucleotide
  modified_base 40: mod_base = OTHER; note = 2'-O-methyl modified nucleotide
  modified_base 69: mod_base = OTHER; note = 2'-O-methyl modified nucleotide
  modified_base 70: mod_base = OTHER; note = 2'-O-methyl modified nucleotide
  modified_base 71: mod_base = OTHER; note = 2'-O-methyl modified nucleotide
  modified_base 72: mod_base = OTHER; note = 2'-O-methyl modified nucleotide
  modified_base 73: mod_base = OTHER; note = 2'-O-methyl modified nucleotide
  modified_base 74: mod_base = OTHER; note = 2'-O-methyl modified nucleotide
  modified_base 75: mod_base = OTHER; note = 2'-O-methyl modified nucleotide
  modified_base 76: mod_base = OTHER; note = 2'-O-methyl modified nucleotide
  modified_base 77: mod_base = OTHER; note = 2'-O-methyl modified nucleotide
  modified_base 78: mod_base = OTHER; note = 2'-O-methyl modified nucleotide
  modified_base 79: mod_base = OTHER; note = 2'-O-methyl modified nucleotide
  modified_base 80: mod_base = OTHER; note = 2'-O-methyl modified nucleotide
  modified_base 81: mod_base = OTHER; note = 2'-O-methyl modified nucleotide
  modified_base 82: mod_base = OTHER; note = 2'-O-methyl modified nucleotide
  modified_base 83: mod_base = OTHER; note = 2'-O-methyl modified nucleotide
  modified_base 84: mod_base = OTHER; note = 2'-O-methyl modified nucleotide
  modified_base 85: mod_base = OTHER; note = 2'-O-methyl modified nucleotide
  modified_base 86: mod_base = OTHER; note = 2'-O-methyl modified nucleotide
  modified_base 87: mod_base = OTHER; note = 2'-O-methyl modified nucleotide
  modified_base 88: mod_base = OTHER; note = 2'-O-methyl modified nucleotide
  modified_base 89: mod_base = OTHER; note = 2'-O-methyl modified nucleotide
  modified_base 90: mod_base = OTHER; note = 2'-O-methyl modified nucleotide
  modified_base 91: mod_base = OTHER; note = 2'-O-methyl modified nucleotide
  modified_base 92: mod_base = OTHER; note = 2'-O-methyl modified nucleotide
  modified_base 93: mod_base = OTHER; note = 2'-O-methyl modified nucleotide
  modified_base 94: mod_base = OTHER; note = 2'-O-methyl modified nucleotide
  modified_base 95: mod_base = OTHER; note = 2'-O-methyl modified nucleotide
  modified_base 96: mod_base = OTHER; note = 2'-O-methyl modified nucleotide
  modified_base 128: mod_base = OTHER; note = Nucleotide with phosphorothioate linkage
  modified_base 129: mod_base = OTHER; note = 2'-O-methyl modified nucleotide with phosphorothioate linkage
  modified_base 130: mod_base = OTHER; note = 2'-O-methyl modified nucleotide with phosphorothioate linkage
  modified_base 131: mod_base = OTHER; note = 2'-O-methyl modified nucleotide
gctggtacacggcagggtcagttttagagctagaaatagcaagttaaaataaggctagtccgttatcaacttgaaaaagtggcaccgagtcggtgcagatatccagaaccctagttgatgaccctgccgtg

SEQ ID NO: 16665 - RNA, 130 nt, synthetic construct
  source 1..130: mol_type = other RNA
  modified_base 1: mod_base = OTHER; note = 2'-O-methyl modified nucleotide with phosphorothioate linkage
  modified_base 2: mod_base = OTHER; note = 2'-O-methyl modified nucleotide with phosphorothioate linkage
  modified_base 3: mod_base = OTHER; note = 2'-O-methyl modified nucleotide with phosphorothioate linkage
  modified_base 29: mod_base = OTHER; note = 2'-O-methyl modified nucleotide
  modified_base 30: mod_base = OTHER; note = 2'-O-methyl modified nucleotide
  modified_base 31: mod_base = OTHER; note = 2'-O-methyl modified nucleotide
  modified_base 32: mod_base = OTHER; note = 2'-O-methyl modified nucleotide
  modified_base 33: mod_base = OTHER; note = 2'-O-methyl modified nucleotide
  modified_base 34: mod_base = OTHER; note = 2'-O-methyl modified nucleotide
  modified_base 35: mod_base = OTHER; note = 2'-O-methyl modified nucleotide
  modified_base 36: mod_base = OTHER; note = 2'-O-methyl modified nucleotide
  modified_base 37: mod_base = OTHER; note = 2'-O-methyl modified nucleotide
  modified_base 38: mod_base = OTHER; note = 2'-O-methyl modified nucleotide
  modified_base 39: mod_base = OTHER; note = 2'-O-methyl modified nucleotide
  modified_base 40: mod_base = OTHER; note = 2'-O-methyl modified nucleotide
  modified_base 69: mod_base = OTHER; note = 2'-O-methyl modified nucleotide
  modified_base 70: mod_base = OTHER; note = 2'-O-methyl modified nucleotide
  modified_base 71: mod_base = OTHER; note = 2'-O-methyl modified nucleotide
  modified_base 72: mod_base = OTHER; note = 2'-O-methyl modified nucleotide
  modified_base 73: mod_base = OTHER; note = 2'-O-methyl modified nucleotide
  modified_base 74: mod_base = OTHER; note = 2'-O-methyl modified nucleotide
  modified_base 75: mod_base = OTHER; note = 2'-O-methyl modified nucleotide
  modified_base 76: mod_base = OTHER; note = 2'-O-methyl modified nucleotide
  modified_base 77: mod_base = OTHER; note = 2'-O-methyl modified nucleotide
  modified_base 78: mod_base = OTHER; note = 2'-O-methyl modified nucleotide
  modified_base 79: mod_base = OTHER; note = 2'-O-methyl modified nucleotide
  modified_base 80: mod_base = OTHER; note = 2'-O-methyl modified nucleotide
  modified_base 81: mod_base = OTHER; note = 2'-O-methyl modified nucleotide
  modified_base 82: mod_base = OTHER; note = 2'-O-methyl modified nucleotide
  modified_base 83: mod_base = OTHER; note = 2'-O-methyl modified nucleotide
  modified_base 84: mod_base = OTHER; note = 2'-O-methyl modified nucleotide
  modified_base 85: mod_base = OTHER; note = 2'-O-methyl modified nucleotide
  modified_base 86: mod_base = OTHER; note = 2'-O-methyl modified nucleotide
  modified_base 87: mod_base = OTHER; note = 2'-O-methyl modified nucleotide
  modified_base 88: mod_base = OTHER; note = 2'-O-methyl modified nucleotide
  modified_base 89: mod_base = OTHER; note = 2'-O-methyl modified nucleotide
  modified_base 90: mod_base = OTHER; note = 2'-O-methyl modified nucleotide
  modified_base 91: mod_base = OTHER; note = 2'-O-methyl modified nucleotide
  modified_base 92: mod_base = OTHER; note = 2'-O-methyl modified nucleotide
  modified_base 93: mod_base = OTHER; note = 2'-O-methyl modified nucleotide
  modified_base 94: mod_base = OTHER; note = 2'-O-methyl modified nucleotide
  modified_base 95: mod_base = OTHER; note = 2'-O-methyl modified nucleotide
  modified_base 96: mod_base = OTHER; note = 2'-O-methyl modified nucleotide
  modified_base 127: mod_base = OTHER; note = Nucleotide with phosphorothioate linkage
  modified_base 128: mod_base = OTHER; note = 2'-O-methyl modified nucleotide with phosphorothioate linkage
  modified_base 129: mod_base = OTHER; note = 2'-O-methyl modified nucleotide with phosphorothioate linkage
  modified_base 130: mod_base = OTHER; note = 2'-O-methyl modified nucleotide
gctggtacacggcagggtcagttttagagctagaaatagcaagttaaaataaggctagtccgttatcaacttgaaaaagtggcaccgagtcggtgcagatatccagaaccctagttgatgaccctgccgt

SEQ ID NO: 16666 - RNA, 129 nt, synthetic construct
  source 1..129: mol_type = other RNA
  modified_base 1: mod_base = OTHER; note = 2'-O-methyl modified nucleotide with phosphorothioate linkage
  modified_base 2: mod_base = OTHER; note = 2'-O-methyl modified nucleotide with phosphorothioate linkage
  modified_base 3: mod_base = OTHER; note = 2'-O-methyl modified nucleotide with phosphorothioate linkage
  modified_base 29: mod_base = OTHER; note = 2'-O-methyl modified nucleotide
  modified_base 30: mod_base = OTHER; note = 2'-O-methyl modified nucleotide
  modified_base 31: mod_base = OTHER; note = 2'-O-methyl modified nucleotide
  modified_base 32: mod_base = OTHER; note = 2'-O-methyl modified nucleotide
  modified_base 33: mod_base = OTHER; note = 2'-O-methyl modified nucleotide
  modified_base 34: mod_base = OTHER; note = 2'-O-methyl modified nucleotide
  modified_base 35: mod_base = OTHER; note = 2'-O-methyl modified nucleotide
  modified_base 36: mod_base = OTHER; note = 2'-O-methyl modified nucleotide
  modified_base 37: mod_base = OTHER; note = 2'-O-methyl modified nucleotide
  modified_base 38: mod_base = OTHER; note = 2'-O-methyl modified nucleotide
  modified_base 39: mod_base = OTHER; note = 2'-O-methyl modified nucleotide
  modified_base 40: mod_base = OTHER; note = 2'-O-methyl modified nucleotide
  modified_base 69: mod_base = OTHER; note = 2'-O-methyl modified nucleotide
  modified_base 70: mod_base = OTHER; note = 2'-O-methyl modified nucleotide
  modified_base 71: mod_base = OTHER; note = 2'-O-methyl modified nucleotide
  modified_base 72: mod_base = OTHER; note = 2'-O-methyl modified nucleotide
  modified_base 73: mod_base = OTHER; note = 2'-O-methyl modified nucleotide
  modified_base 74: mod_base = OTHER; note = 2'-O-methyl modified nucleotide
  modified_base 75: mod_base = OTHER; note = 2'-O-methyl modified nucleotide
  modified_base 76: mod_base = OTHER; note = 2'-O-methyl modified nucleotide
  modified_base 77: mod_base = OTHER; note = 2'-O-methyl modified nucleotide
  modified_base 78: mod_base = OTHER; note = 2'-O-methyl modified nucleotide
  modified_base 79: mod_base = OTHER; note = 2'-O-methyl modified nucleotide
  modified_base 80: mod_base = OTHER; note = 2'-O-methyl modified nucleotide
  modified_base 81: mod_base = OTHER; note = 2'-O-methyl modified nucleotide
  modified_base 82: mod_base = OTHER; note = 2'-O-methyl modified nucleotide
  modified_base 83: mod_base = OTHER; note = 2'-O-methyl modified nucleotide
  modified_base 84: mod_base = OTHER; note = 2'-O-methyl modified nucleotide
  modified_base 85: mod_base = OTHER; note = 2'-O-methyl modified nucleotide
  modified_base 86: mod_base = OTHER; note = 2'-O-methyl modified nucleotide
  modified_base 87: mod_base = OTHER; note = 2'-O-methyl modified nucleotide
  modified_base 88: mod_base = OTHER; note = 2'-O-methyl modified nucleotide
  modified_base 89: mod_base = OTHER; note = 2'-O-methyl modified nucleotide
  modified_base 90: mod_base = OTHER; note = 2'-O-methyl modified nucleotide
  modified_base 91: mod_base = OTHER; note = 2'-O-methyl modified nucleotide
  modified_base 92: mod_base = OTHER; note = 2'-O-methyl modified nucleotide
  modified_base 93: mod_base = OTHER; note = 2'-O-methyl modified nucleotide
  modified_base 94: mod_base = OTHER; note = 2'-O-methyl modified nucleotide
  modified_base 95: mod_base = OTHER; note = 2'-O-methyl modified nucleotide
  modified_base 96: mod_base = OTHER; note = 2'-O-methyl modified nucleotide
  modified_base 126: mod_base = OTHER; note = Nucleotide with phosphorothioate linkage
  modified_base 127: mod_base = OTHER; note = 2'-O-methyl modified nucleotide with phosphorothioate linkage
  modified_base 128: mod_base = OTHER; note = 2'-O-methyl modified nucleotide with phosphorothioate linkage
  modified_base 129: mod_base = OTHER; note = 2'-O-methyl modified nucleotide
gctggtacacggcagggtcagttttagagctagaaatagcaagttaaaataaggctagtccgttatcaacttgaaaaagtggcaccgagtcggtgcagatatccagaaccctagttgatgaccctgccg

SEQ ID NO: 16667 - RNA, 136 nt, synthetic construct
  source 1..136: mol_type = other RNA
  modified_base 1: mod_base = OTHER; note = 2'-O-methyl modified nucleotide with phosphorothioate linkage
  modified_base 2: mod_base = OTHER; note = 2'-O-methyl modified nucleotide with phosphorothioate linkage
  modified_base 3: mod_base = OTHER; note = 2'-O-methyl modified nucleotide with phosphorothioate linkage
  modified_base 29: mod_base = OTHER; note = 2'-O-methyl modified nucleotide
  modified_base 30: mod_base = OTHER; note = 2'-O-methyl modified nucleotide
  modified_base 31: mod_base = OTHER; note = 2'-O-methyl modified nucleotide
  modified_base 32: mod_base = OTHER; note = 2'-O-methyl modified nucleotide
  modified_base 33: mod_base = OTHER; note = 2'-O-methyl modified nucleotide
  modified_base 34: mod_base = OTHER; note = 2'-O-methyl modified nucleotide
  modified_base 35: mod_base = OTHER; note = 2'-O-methyl modified nucleotide
  modified_base 36: mod_base = OTHER; note = 2'-O-methyl modified nucleotide
  modified_base 37: mod_base = OTHER; note = 2'-O-methyl modified nucleotide
  modified_base 38: mod_base = OTHER; note = 2'-O-methyl modified nucleotide
  modified_base 39: mod_base = OTHER; note = 2'-O-methyl modified nucleotide
  modified_base 40: mod_base = OTHER; note = 2'-O-methyl modified nucleotide
  modified_base 69: mod_base = OTHER; note = 2'-O-methyl modified nucleotide
  modified_base 70: mod_base = OTHER; note = 2'-O-methyl modified nucleotide
  modified_base 71: mod_base = OTHER; note = 2'-O-methyl modified nucleotide
  modified_base 72: mod_base = OTHER; note = 2'-O-methyl modified nucleotide
  modified_base 73: mod_base = OTHER; note = 2'-O-methyl modified nucleotide
  modified_base 74: mod_base = OTHER; note = 2'-O-methyl modified nucleotide
  modified_base 75: mod_base = OTHER; note = 2'-O-methyl modified nucleotide
  modified_base 76: mod_base = OTHER; note = 2'-O-methyl modified nucleotide
  modified_base 77: mod_base = OTHER; note = 2'-O-methyl modified nucleotide
  modified_base 78: mod_base = OTHER; note = 2'-O-methyl modified nucleotide
  modified_base 79: mod_base = OTHER; note = 2'-O-methyl modified nucleotide
  modified_base 80: mod_base = OTHER; note = 2'-O-methyl modified nucleotide
  modified_base 81: mod_base = OTHER; note = 2'-O-methyl modified nucleotide
  modified_base 82: mod_base = OTHER; note = 2'-O-methyl modified nucleotide
  modified_base 83: mod_base = OTHER; note = 2'-O-methyl modified nucleotide
  modified_base 84: mod_base = OTHER; note = 2'-O-methyl modified nucleotide
  modified_base 85: mod_base = OTHER; note = 2'-O-methyl modified nucleotide
  modified_base 86: mod_base = OTHER; note = 2'-O-methyl modified nucleotide
  modified_base 87: mod_base = OTHER; note = 2'-O-methyl modified nucleotide
  modified_base 88: mod_base = OTHER; note = 2'-O-methyl modified nucleotide
  modified_base 89: mod_base = OTHER; note = 2'-O-methyl modified nucleotide
  modified_base 90: mod_base = OTHER; note = 2'-O-methyl modified nucleotide
  modified_base 91: mod_base = OTHER; note = 2'-O-methyl modified nucleotide
  modified_base 92: mod_base = OTHER; note = 2'-O-methyl modified nucleotide
  modified_base 93: mod_base = OTHER; note = 2'-O-methyl modified nucleotide
  modified_base 94: mod_base = OTHER; note = 2'-O-methyl modified nucleotide
  modified_base 95: mod_base = OTHER; note = 2'-O-methyl modified nucleotide
  modified_base 96: mod_base = OTHER; note = 2'-O-methyl modified nucleotide
  modified_base 133: mod_base = OTHER; note = Nucleotide with phosphorothioate linkage
  modified_base 134: mod_base = OTHER; note = 2'-O-methyl modified nucleotide with phosphorothioate linkage
  modified_base 135: mod_base = OTHER; note = 2'-O-methyl modified nucleotide with phosphorothioate linkage
  modified_base 136: mod_base = OTHER; note = 2'-O-methyl modified nucleotide
gctggtacacggcagggtcagttttagagctagaaatagcaagttaaaataaggctagtccgttatcaacttgaaaaagtggcaccgagtcggtgcacagatatccagaaccctagttgatgaccctgccgtgtac

SEQ ID NO: 16668 - RNA, 135 nt, synthetic construct
  source 1..135: mol_type = other RNA
  modified_base 1: mod_base = OTHER; note = 2'-O-methyl modified nucleotide with phosphorothioate linkage
  modified_base 2: mod_base = OTHER; note = 2'-O-methyl modified nucleotide with phosphorothioate linkage
  modified_base 3: mod_base = OTHER; note = 2'-O-methyl modified nucleotide with phosphorothioate linkage
  modified_base 29: mod_base = OTHER; note = 2'-O-methyl modified nucleotide
  modified_base 30: mod_base = OTHER; note = 2'-O-methyl modified nucleotide
  modified_base 31: mod_base = OTHER; note = 2'-O-methyl modified nucleotide
  modified_base 32: mod_base = OTHER; note = 2'-O-methyl modified nucleotide
  modified_base 33: mod_base = OTHER; note = 2'-O-methyl modified nucleotide
  modified_base 34: mod_base = OTHER; note = 2'-O-methyl modified nucleotide
  modified_base 35: mod_base = OTHER; note = 2'-O-methyl modified nucleotide
  modified_base 36: mod_base = OTHER; note = 2'-O-methyl modified nucleotide
  modified_base 37: mod_base = OTHER; note = 2'-O-methyl modified nucleotide
  modified_base 38: mod_base = OTHER; note = 2'-O-methyl modified nucleotide
  modified_base 39: mod_base = OTHER; note = 2'-O-methyl modified nucleotide
  modified_base 40: mod_base = OTHER; note = 2'-O-methyl modified nucleotide
  modified_base 69: mod_base = OTHER; note = 2'-O-methyl modified nucleotide
  modified_base 70: mod_base = OTHER; note = 2'-O-methyl modified nucleotide
  modified_base 71: mod_base = OTHER; note = 2'-O-methyl modified nucleotide
  modified_base 72: mod_base = OTHER; note = 2'-O-methyl modified nucleotide
  modified_base 73: mod_base = OTHER; note = 2'-O-methyl modified nucleotide
  modified_base 74: mod_base = OTHER; note = 2'-O-methyl modified nucleotide
  modified_base 75: mod_base = OTHER; note = 2'-O-methyl modified nucleotide
  modified_base 76: mod_base = OTHER; note = 2'-O-methyl modified nucleotide
  modified_base 77: mod_base = OTHER; note = 2'-O-methyl modified nucleotide
  modified_base 78: mod_base = OTHER; note = 2'-O-methyl modified nucleotide
  modified_base 79: mod_base = OTHER; note = 2'-O-methyl modified nucleotide
  modified_base 80: mod_base = OTHER; note = 2'-O-methyl modified nucleotide
  modified_base 81: mod_base = OTHER; note = 2'-O-methyl modified nucleotide
  modified_base 82: mod_base = OTHER; note = 2'-O-methyl modified nucleotide
  modified_base 83: mod_base = OTHER; note = 2'-O-methyl modified nucleotide
  modified_base 84: mod_base = OTHER; note = 2'-O-methyl modified nucleotide
  modified_base 85: mod_base = OTHER; note = 2'-O-methyl modified nucleotide
  modified_base 86: mod_base = OTHER; note = 2'-O-methyl modified nucleotide
  modified_base 87: mod_base = OTHER; note = 2'-O-methyl modified nucleotide
  modified_base 88: mod_base = OTHER; note = 2'-O-methyl modified nucleotide
  modified_base 89: mod_base = OTHER; note = 2'-O-methyl modified nucleotide
  modified_base 90: mod_base = OTHER; note = 2'-O-methyl modified nucleotide
  modified_base 91: mod_base = OTHER; note = 2'-O-methyl modified nucleotide
  modified_base 92: mod_base = OTHER; note = 2'-O-methyl modified nucleotide
  modified_base 93: mod_base = OTHER; note = 2'-O-methyl modified nucleotide
  modified_base 94: mod_base = OTHER; note = 2'-O-methyl modified nucleotide
  modified_base 95: mod_base = OTHER; note = 2'-O-methyl modified nucleotide
  modified_base 96: mod_base = OTHER; note = 2'-O-methyl modified nucleotide
  modified_base 132: mod_base = OTHER; note = Nucleotide with phosphorothioate linkage
  modified_base 133: mod_base = OTHER; note = 2'-O-methyl modified nucleotide with phosphorothioate linkage
  modified_base 134: mod_base = OTHER; note = 2'-O-methyl modified nucleotide with phosphorothioate linkage
  modified_base 135: mod_base = OTHER; note = 2'-O-methyl modified nucleotide
gctggtacacggcagggtcagttttagagctagaaatagcaagttaaaataaggctagtccgttatcaacttgaaaaagtggcaccgagtcggtgcacagatatccagaaccctagttgatgaccctgccgtgta

SEQ ID NO: 16669 - RNA, 134 nt, synthetic construct
  source 1..134: mol_type = other RNA
  modified_base 1: mod_base = OTHER; note = 2'-O-methyl modified nucleotide with phosphorothioate linkage
  modified_base 2: mod_base = OTHER; note = 2'-O-methyl modified nucleotide with phosphorothioate linkage
  modified_base 3: mod_base = OTHER; note = 2'-O-methyl modified nucleotide with phosphorothioate linkage
  modified_base 29: mod_base = OTHER; note = 2'-O-methyl modified nucleotide
  modified_base 30: mod_base = OTHER; note = 2'-O-methyl modified nucleotide
  modified_base 31: mod_base = OTHER; note = 2'-O-methyl modified nucleotide
  modified_base 32: mod_base = OTHER; note = 2'-O-methyl modified nucleotide
  modified_base 33: mod_base = OTHER; note = 2'-O-methyl modified nucleotide
  modified_base 34: mod_base = OTHER; note = 2'-O-methyl modified nucleotide
  modified_base 35: mod_base = OTHER; note = 2'-O-methyl modified nucleotide
  modified_base 36: mod_base = OTHER; note = 2'-O-methyl modified nucleotide
  modified_base 37: mod_base = OTHER; note = 2'-O-methyl modified nucleotide
  modified_base 38: mod_base = OTHER; note = 2'-O-methyl modified nucleotide
  modified_base 39: mod_base = OTHER; note = 2'-O-methyl modified nucleotide
  modified_base 40: mod_base = OTHER; note = 2'-O-methyl modified nucleotide
  modified_base 69: mod_base = OTHER; note = 2'-O-methyl modified nucleotide
  modified_base 70: mod_base = OTHER; note = 2'-O-methyl modified nucleotide
  modified_base 71: mod_base = OTHER; note = 2'-O-methyl modified nucleotide
  modified_base 72: mod_base = OTHER; note = 2'-O-methyl modified nucleotide
  modified_base 73: mod_base = OTHER; note = 2'-O-methyl modified nucleotide
  modified_base 74: mod_base = OTHER; note = 2'-O-methyl modified nucleotide
  modified_base 75: mod_base = OTHER; note = 2'-O-methyl modified nucleotide
  modified_base 76: mod_base = OTHER; note = 2'-O-methyl modified nucleotide
  modified_base 77: mod_base = OTHER; note = 2'-O-methyl modified nucleotide
  modified_base 78: mod_base = OTHER; note = 2'-O-methyl modified nucleotide
  modified_base 79: mod_base = OTHER; note = 2'-O-methyl modified nucleotide
  modified_base 80: mod_base = OTHER; note = 2'-O-methyl modified nucleotide
  modified_base 81: mod_base = OTHER; note = 2'-O-methyl modified nucleotide
  modified_base 82: mod_base = OTHER; note = 2'-O-methyl modified nucleotide
  modified_base 83: mod_base = OTHER; note = 2'-O-methyl modified nucleotide
  modified_base 84: mod_base = OTHER; note = 2'-O-methyl modified nucleotide
  modified_base 85: mod_base = OTHER; note = 2'-O-methyl modified nucleotide
  modified_base 86: mod_base = OTHER; note = 2'-O-methyl modified nucleotide
  modified_base 87: mod_base = OTHER; note = 2'-O-methyl modified nucleotide
  modified_base 88: mod_base = OTHER; note = 2'-O-methyl modified nucleotide
  modified_base 89: mod_base = OTHER; note = 2'-O-methyl modified nucleotide
  modified_base 90: mod_base = OTHER; note = 2'-O-methyl modified nucleotide
  modified_base 91: mod_base = OTHER; note = 2'-O-methyl modified nucleotide
  modified_base 92: mod_base = OTHER; note = 2'-O-methyl modified nucleotide
  modified_base 93: mod_base = OTHER; note = 2'-O-methyl modified nucleotide
  modified_base 94: mod_base = OTHER; note = 2'-O-methyl modified nucleotide
  modified_base 95: mod_base = OTHER; note = 2'-O-methyl modified nucleotide
  modified_base 96: mod_base = OTHER; note = 2'-O-methyl modified nucleotide
  modified_base 131: mod_base = OTHER; note = Nucleotide with phosphorothioate linkage
  modified_base 132: mod_base = OTHER; note = 2'-O-methyl modified nucleotide with phosphorothioate linkage
  modified_base 133: mod_base = OTHER; note = 2'-O-methyl modified nucleotide with phosphorothioate linkage
  modified_base 134: mod_base = OTHER; note = 2'-O-methyl modified nucleotide
gctggtacacggcagggtcagttttagagctagaaatagcaagttaaaataaggctagtccgttatcaacttgaaaaagtggcaccgagtcggtgcacagatatccagaaccctagttgatgaccctgccgtgt

SEQ ID NO: 16670 - RNA, 133 nt, synthetic construct
  source 1..133: mol_type = other RNA
  modified_base 1: mod_base = OTHER; note = 2'-O-methyl modified nucleotide with phosphorothioate linkage
  modified_base 2: mod_base = OTHER; note = 2'-O-methyl modified nucleotide with phosphorothioate linkage
  modified_base 3: mod_base = OTHER; note = 2'-O-methyl modified nucleotide with phosphorothioate linkage
  modified_base 29: mod_base = OTHER; note = 2'-O-methyl modified nucleotide
  modified_base 30: mod_base = OTHER; note = 2'-O-methyl modified nucleotide
  modified_base 31: mod_base = OTHER; note = 2'-O-methyl modified nucleotide
  modified_base 32: mod_base = OTHER; note = 2'-O-methyl modified nucleotide
  modified_base 33: mod_base = OTHER; note = 2'-O-methyl modified nucleotide
  modified_base 34: mod_base = OTHER; note = 2'-O-methyl modified nucleotide
  modified_base 35: mod_base = OTHER; note = 2'-O-methyl modified nucleotide
  modified_base 36: mod_base = OTHER; note = 2'-O-methyl modified nucleotide
  modified_base 37: mod_base = OTHER; note = 2'-O-methyl modified nucleotide
  modified_base 38: mod_base = OTHER; note = 2'-O-methyl modified nucleotide
  modified_base 39: mod_base = OTHER; note = 2'-O-methyl modified nucleotide
  modified_base 40: mod_base = OTHER; note = 2'-O-methyl modified nucleotide
  modified_base 69: mod_base = OTHER; note = 2'-O-methyl modified nucleotide
  modified_base 70: mod_base = OTHER; note = 2'-O-methyl modified nucleotide
  modified_base 71: mod_base = OTHER; note = 2'-O-methyl modified nucleotide
  modified_base 72: mod_base = OTHER; note = 2'-O-methyl modified nucleotide
  modified_base 73: mod_base = OTHER; note = 2'-O-methyl modified nucleotide
  modified_base 74: mod_base = OTHER; note = 2'-O-methyl modified nucleotide
  modified_base 75: mod_base = OTHER; note = 2'-O-methyl modified nucleotide
  modified_base 76: mod_base = OTHER; note = 2'-O-methyl modified nucleotide
  modified_base 77: mod_base = OTHER; note = 2'-O-methyl modified nucleotide
  modified_base 78: mod_base = OTHER; note = 2'-O-methyl modified nucleotide
  modified_base 79: mod_base = OTHER; note = 2'-O-methyl modified nucleotide
  modified_base 80: mod_base = OTHER; note = 2'-O-methyl modified nucleotide
  modified_base 81: mod_base = OTHER; note = 2'-O-methyl modified nucleotide
  modified_base 82: mod_base = OTHER; note = 2'-O-methyl modified nucleotide
  modified_base 83: mod_base = OTHER; note = 2'-O-methyl modified nucleotide
  modified_base 84: mod_base = OTHER; note = 2'-O-methyl modified nucleotide
  modified_base 85: mod_base = OTHER; note = 2'-O-methyl modified nucleotide
  modified_base 86: mod_base = OTHER; note = 2'-O-methyl modified nucleotide
  modified_base 87: mod_base = OTHER; note = 2'-O-methyl modified nucleotide
  modified_base 88: mod_base = OTHER; note = 2'-O-methyl modified nucleotide
  modified_base 89: mod_base = OTHER; note = 2'-O-methyl modified nucleotide
  modified_base 90: mod_base = OTHER; note = 2'-O-methyl modified nucleotide
  modified_base 91: mod_base = OTHER; note = 2'-O-methyl modified nucleotide
  modified_base 92: mod_base = OTHER; note = 2'-O-methyl modified nucleotide
  modified_base 93: mod_base = OTHER; note = 2'-O-methyl modified nucleotide
  modified_base 94: mod_base = OTHER; note = 2'-O-methyl modified nucleotide
  modified_base 95: mod_base = OTHER; note = 2'-O-methyl modified nucleotide
  modified_base 96: mod_base = OTHER; note = 2'-O-methyl modified nucleotide
  modified_base 130: mod_base = OTHER; note = Nucleotide with phosphorothioate linkage
  modified_base 131: mod_base = OTHER; note = 2'-O-methyl modified nucleotide with phosphorothioate linkage
  modified_base 132: mod_base = OTHER; note = 2'-O-methyl modified nucleotide with phosphorothioate linkage
  modified_base 133: mod_base = OTHER; note = 2'-O-methyl modified nucleotide
gctggtacacggcagggtcagttttagagctagaaatagcaagttaaaataaggctagtccgttatcaacttgaaaaagtggcaccgagtcggtgcacagatatccagaaccctagttgatgaccctgccgtg

SEQ ID NO: 16671 - RNA, 132 nt, synthetic construct
  source 1..132: mol_type = other RNA
  modified_base 1: mod_base = OTHER; note = 2'-O-methyl modified nucleotide with phosphorothioate linkage
  modified_base 2: mod_base = OTHER; note = 2'-O-methyl modified nucleotide with phosphorothioate linkage
  modified_base 3: mod_base = OTHER; note = 2'-O-methyl modified nucleotide with phosphorothioate linkage
  modified_base 29: mod_base = OTHER; note = 2'-O-methyl modified nucleotide
  modified_base 30: mod_base = OTHER; note = 2'-O-methyl modified nucleotide
  modified_base 31: mod_base = OTHER; note = 2'-O-methyl modified nucleotide
  modified_base 32: mod_base = OTHER; note = 2'-O-methyl modified nucleotide
  modified_base 33: mod_base = OTHER; note = 2'-O-methyl modified nucleotide
  modified_base 34: mod_base = OTHER; note = 2'-O-methyl modified nucleotide
  modified_base 35: mod_base = OTHER; note = 2'-O-methyl modified nucleotide
  modified_base 36: mod_base = OTHER; note = 2'-O-methyl modified nucleotide
  modified_base 37: mod_base = OTHER; note = 2'-O-methyl modified nucleotide
  modified_base 38: mod_base = OTHER; note = 2'-O-methyl modified nucleotide
  modified_base 39: mod_base = OTHER; note = 2'-O-methyl modified nucleotide
  modified_base 40: mod_base = OTHER; note = 2'-O-methyl modified nucleotide
  modified_base 69: mod_base = OTHER; note = 2'-O-methyl modified nucleotide
  modified_base 70: mod_base = OTHER; note = 2'-O-methyl modified nucleotide
  modified_base 71: mod_base = OTHER; note = 2'-O-methyl modified nucleotide
  modified_base 72: mod_base = OTHER; note = 2'-O-methyl modified nucleotide
  modified_base 73: mod_base = OTHER; note = 2'-O-methyl modified nucleotide
  modified_base 74: mod_base = OTHER; note = 2'-O-methyl modified nucleotide
  modified_base 75: mod_base = OTHER; note = 2'-O-methyl modified nucleotide
  modified_base 76: mod_base = OTHER; note = 2'-O-methyl modified nucleotide
  modified_base 77: mod_base = OTHER; note = 2'-O-methyl modified nucleotide
  modified_base 78: mod_base = OTHER; note = 2'-O-methyl modified nucleotide
  modified_base 79: mod_base = OTHER; note = 2'-O-methyl modified nucleotide
  modified_base 80: mod_base = OTHER; note = 2'-O-methyl modified nucleotide
  modified_base 81: mod_base = OTHER; note = 2'-O-methyl modified nucleotide
  modified_base 82: mod_base = OTHER; note = 2'-O-methyl modified nucleotide
  modified_base 83: mod_base = OTHER; note = 2'-O-methyl modified nucleotide
  modified_base 84: mod_base = OTHER; note = 2'-O-methyl modified nucleotide
  modified_base 85: mod_base = OTHER; note = 2'-O-methyl modified nucleotide
  modified_base 86: mod_base = OTHER; note = 2'-O-methyl modified nucleotide
  modified_base 87: mod_base = OTHER; note = 2'-O-methyl modified nucleotide
  modified_base 88: mod_base = OTHER; note = 2'-O-methyl modified nucleotide
  modified_base 89: mod_base = OTHER; note = 2'-O-methyl modified nucleotide
  modified_base 90: mod_base = OTHER; note = 2'-O-methyl modified nucleotide
  modified_base 91: mod_base = OTHER; note = 2'-O-methyl modified nucleotide
  modified_base 92: mod_base = OTHER; note = 2'-O-methyl modified nucleotide
  modified_base 93: mod_base = OTHER; note = 2'-O-methyl modified nucleotide
  modified_base 94: mod_base = OTHER; note = 2'-O-methyl modified nucleotide
  modified_base 95: mod_base = OTHER; note = 2'-O-methyl modified nucleotide
  modified_base 96: mod_base = OTHER; note = 2'-O-methyl modified nucleotide
  modified_base 129: mod_base = OTHER; note = Nucleotide with phosphorothioate linkage
  modified_base 130: mod_base = OTHER; note = 2'-O-methyl modified nucleotide with phosphorothioate linkage
  modified_base 131: mod_base = OTHER; note = 2'-O-methyl modified nucleotide with phosphorothioate linkage
  modified_base 132: mod_base = OTHER; note = 2'-O-methyl modified nucleotide
gctggtacacggcagggtcagttttagagctagaaatagcaagttaaaataaggctagtccgttatcaacttgaaaaagtggcaccgagtcggtgcacagatatccagaaccctagttgatgaccctgccgt

SEQ ID NO: 16672 - RNA, 131 nt, synthetic construct
  source 1..131: mol_type = other RNA
  modified_base 1: mod_base = OTHER; note = 2'-O-methyl modified nucleotide with phosphorothioate linkage
  modified_base 2: mod_base = OTHER; note = 2'-O-methyl modified nucleotide with phosphorothioate linkage
  modified_base 3: mod_base = OTHER; note = 2'-O-methyl modified nucleotide with phosphorothioate linkage
  modified_base 29: mod_base = OTHER; note = 2'-O-methyl modified nucleotide
  modified_base 30: mod_base = OTHER; note = 2'-O-methyl modified nucleotide
  modified_base 31: mod_base = OTHER; note = 2'-O-methyl modified nucleotide
  modified_base 32: mod_base = OTHER; note = 2'-O-methyl modified nucleotide
  modified_base 33: mod_base = OTHER; note = 2'-O-methyl modified nucleotide
  modified_base 34: mod_base = OTHER; note = 2'-O-methyl modified nucleotide
  modified_base 35: mod_base = OTHER; note = 2'-O-methyl modified nucleotide
  modified_base 36: mod_base = OTHER; note = 2'-O-methyl modified nucleotide
  modified_base 37: mod_base = OTHER; note = 2'-O-methyl modified nucleotide
  modified_base 38: mod_base = OTHER; note = 2'-O-methyl modified nucleotide
  modified_base 39: mod_base = OTHER; note = 2'-O-methyl modified nucleotide
  modified_base 40: mod_base = OTHER; note = 2'-O-methyl modified nucleotide
  modified_base 69: mod_base = OTHER; note = 2'-O-methyl modified nucleotide
  modified_base 70: mod_base = OTHER; note = 2'-O-methyl modified nucleotide
  modified_base 71: mod_base = OTHER; note = 2'-O-methyl modified nucleotide
  modified_base 72: mod_base = OTHER; note = 2'-O-methyl modified nucleotide
  modified_base 73: mod_base = OTHER; note = 2'-O-methyl modified nucleotide
  modified_base 74: mod_base = OTHER; note = 2'-O-methyl modified nucleotide
  modified_base 75: mod_base = OTHER; note = 2'-O-methyl modified nucleotide
  modified_base 76: mod_base = OTHER; note = 2'-O-methyl modified nucleotide
  modified_base 77: mod_base = OTHER; note = 2'-O-methyl modified nucleotide
  modified_base 78: mod_base = OTHER; note = 2'-O-methyl modified nucleotide
  modified_base 79: mod_base = OTHER; note = 2'-O-methyl modified nucleotide
  modified_base 80: mod_base = OTHER; note = 2'-O-methyl modified nucleotide
  modified_base 81: mod_base = OTHER; note = 2'-O-methyl modified nucleotide
  modified_base 82: mod_base = OTHER; note = 2'-O-methyl modified nucleotide
  modified_base 83: mod_base = OTHER; note = 2'-O-methyl modified nucleotide
  modified_base 84: mod_base = OTHER; note = 2'-O-methyl modified nucleotide
  modified_base 85: mod_base = OTHER; note = 2'-O-methyl modified nucleotide
  modified_base 86: mod_base = OTHER; note = 2'-O-methyl modified nucleotide
  modified_base 87: mod_base = OTHER; note = 2'-O-methyl modified nucleotide
  modified_base 88: mod_base = OTHER; note = 2'-O-methyl modified nucleotide
  modified_base 89: mod_base = OTHER; note = 2'-O-methyl modified nucleotide
  modified_base 90: mod_base = OTHER; note = 2'-O-methyl modified nucleotide
  modified_base 91: mod_base = OTHER; note = 2'-O-methyl modified nucleotide
  modified_base 92: mod_base = OTHER; note = 2'-O-methyl modified nucleotide
  modified_base 93: mod_base = OTHER; note = 2'-O-methyl modified nucleotide
  modified_base 94: mod_base = OTHER; note = 2'-O-methyl modified nucleotide
  modified_base 95: mod_base = OTHER; note = 2'-O-methyl modified nucleotide
  modified_base 96: mod_base = OTHER; note = 2'-O-methyl modified nucleotide
  modified_base 128: mod_base = OTHER; note = Nucleotide with phosphorothioate linkage
  modified_base 129: mod_base = OTHER; note = 2'-O-methyl modified nucleotide with phosphorothioate linkage
  modified_base 130: mod_base = OTHER; note = 2'-O-methyl modified nucleotide with phosphorothioate linkage
  modified_base 131: mod_base = OTHER; note = 2'-O-methyl modified nucleotide
gctggtacacggcagggtcagttttagagctagaaatagcaagttaaaataaggctagtccgttatcaacttgaaaaagtggcaccgagtcggtgcacagatatccagaaccctagttgatgaccctgccg

SEQ ID NO: 16673 - RNA, 117 nt, synthetic construct
  source 1..117: mol_type = other RNA
  modified_base 1: mod_base = OTHER; note = 2'-O-methyl modified nucleotide with phosphorothioate linkage
  modified_base 2: mod_base = OTHER; note = 2'-O-methyl modified nucleotide with phosphorothioate linkage
  modified_base 3: mod_base = OTHER; note = 2'-O-methyl modified nucleotide with phosphorothioate linkage
  modified_base 29: mod_base = OTHER; note = 2'-O-methyl modified nucleotide
  modified_base 30: mod_base = OTHER; note = 2'-O-methyl modified nucleotide
  modified_base 31: mod_base = OTHER; note = 2'-O-methyl modified nucleotide
  modified_base 32: mod_base = OTHER; note = 2'-O-methyl modified nucleotide
  modified_base 33: mod_base = OTHER; note = 2'-O-methyl modified nucleotide
  modified_base 34: mod_base = OTHER; note = 2'-O-methyl modified nucleotide
  modified_base 35: mod_base = OTHER; note = 2'-O-methyl modified nucleotide
  modified_base 36: mod_base = OTHER; note = 2'-O-methyl modified nucleotide
  modified_base 37: mod_base = OTHER; note = 2'-O-methyl modified nucleotide
  modified_base 38: mod_base = OTHER; note = 2'-O-methyl modified nucleotide
  modified_base 39: mod_base = OTHER; note = 2'-O-methyl modified nucleotide
  modified_base 40: mod_base = OTHER; note = 2'-O-methyl modified nucleotide
  modified_base 69: mod_base = OTHER; note = 2'-O-methyl modified nucleotide
  modified_base 70: mod_base = OTHER; note = 2'-O-methyl modified nucleotide
  modified_base 71: mod_base = OTHER; note = 2'-O-methyl modified nucleotide
  modified_base 72: mod_base = OTHER; note = 2'-O-methyl modified nucleotide
  modified_base 73: mod_base = OTHER; note = 2'-O-methyl modified nucleotide
  modified_base 74: mod_base = OTHER; note = 2'-O-methyl modified nucleotide
  modified_base 75: mod_base = OTHER; note = 2'-O-methyl modified nucleotide
  modified_base 76: mod_base = OTHER; note = 2'-O-methyl modified nucleotide
  modified_base 77: mod_base = OTHER; note = 2'-O-methyl modified nucleotide
  modified_base 78: mod_base = OTHER; note = 2'-O-methyl modified nucleotide
  modified_base 79: mod_base = OTHER; note = 2'-O-methyl modified nucleotide
  modified_base 80: mod_base = OTHER; note = 2'-O-methyl modified nucleotide
  modified_base 81: mod_base = OTHER; note = 2'-O-methyl modified nucleotide
  modified_base 82: mod_base = OTHER; note = 2'-O-methyl modified nucleotide
  modified_base 83: mod_base = OTHER; note = 2'-O-methyl modified nucleotide
  modified_base 84: mod_base = OTHER; note = 2'-O-methyl modified nucleotide
  modified_base 85: mod_base = OTHER; note = 2'-O-methyl modified nucleotide
  modified_base 86: mod_base = OTHER; note = 2'-O-methyl modified nucleotide
  modified_base 87: mod_base = OTHER; note = 2'-O-methyl modified nucleotide
  modified_base 88: mod_base = OTHER; note = 2'-O-methyl modified nucleotide
  modified_base 89: mod_base = OTHER; note = 2'-O-methyl modified nucleotide
  modified_base 90: mod_base = OTHER; note = 2'-O-methyl modified nucleotide
  modified_base 91: mod_base = OTHER; note = 2'-O-methyl modified nucleotide
  modified_base 92: mod_base = OTHER; note = 2'-O-methyl modified nucleotide
  modified_base 93: mod_base = OTHER; note = 2'-O-methyl modified nucleotide
  modified_base 94: mod_base = OTHER; note = 2'-O-methyl modified nucleotide
  modified_base 95: mod_base = OTHER; note = 2'-O-methyl modified nucleotide
  modified_base 96: mod_base = OTHER; note = 2'-O-methyl modified nucleotide
  modified_base 114: mod_base = OTHER; note = Nucleotide with phosphorothioate linkage
  modified_base 115: mod_base = OTHER; note = 2'-O-methyl modified nucleotide with phosphorothioate linkage
  modified_base 116: mod_base = OTHER; note = 2'-O-methyl modified nucleotide with phosphorothioate linkage
  modified_base 117: mod_base = OTHER; note = 2'-O-methyl modified nucleotide
gctggtacacggcagggtcagttttagagctagaaatagcaagttaaaataaggctagtccgttatcaacttgaaaaagtggcaccgagtcggtgctccagtgaccctgccgtgtac

SEQ ID NO: 16674 - RNA, 116 nt, synthetic construct
  source 1..116: mol_type = other RNA
  modified_base 1: mod_base = OTHER; note = 2'-O-methyl modified nucleotide with phosphorothioate linkage
  modified_base 2: mod_base = OTHER; note = 2'-O-methyl modified nucleotide with phosphorothioate linkage
  modified_base 3: mod_base = OTHER; note = 2'-O-methyl modified nucleotide with phosphorothioate linkage
  modified_base 29: mod_base = OTHER; note = 2'-O-methyl modified nucleotide
  modified_base 30: mod_base = OTHER; note = 2'-O-methyl modified nucleotide
  modified_base 31: mod_base = OTHER; note = 2'-O-methyl modified nucleotide
  modified_base 32: mod_base = OTHER; note = 2'-O-methyl modified nucleotide
  modified_base 33: mod_base = OTHER; note = 2'-O-methyl modified nucleotide
  modified_base 34: mod_base = OTHER; note = 2'-O-methyl modified nucleotide
  modified_base 35: mod_base = OTHER; note = 2'-O-methyl modified nucleotide
  modified_base 36: mod_base = OTHER; note = 2'-O-methyl modified nucleotide
  modified_base 37: mod_base = OTHER; note = 2'-O-methyl modified nucleotide
  modified_base 38: mod_base = OTHER; note = 2'-O-methyl modified nucleotide
  modified_base 39: mod_base = OTHER; note = 2'-O-methyl modified nucleotide
  modified_base 40: mod_base = OTHER; note = 2'-O-methyl modified nucleotide
  modified_base 69: mod_base = OTHER; note = 2'-O-methyl modified nucleotide
  modified_base 70: mod_base = OTHER; note = 2'-O-methyl modified nucleotide
  modified_base 71: mod_base = OTHER; note = 2'-O-methyl modified nucleotide
  modified_base 72: mod_base = OTHER; note = 2'-O-methyl modified nucleotide
  modified_base 73: mod_base = OTHER; note = 2'-O-methyl modified nucleotide
  modified_base 74: mod_base = OTHER; note = 2'-O-methyl modified nucleotide
  modified_base 75: mod_base = OTHER; note = 2'-O-methyl modified nucleotide
  modified_base 76: mod_base = OTHER; note = 2'-O-methyl modified nucleotide
  modified_base 77: mod_base = OTHER; note = 2'-O-methyl modified nucleotide
  modified_base 78: mod_base = OTHER; note = 2'-O-methyl modified nucleotide
  modified_base 79: mod_base = OTHER; note = 2'-O-methyl modified nucleotide
  modified_base 80: mod_base = OTHER; note = 2'-O-methyl modified nucleotide
  modified_base 81: mod_base = OTHER; note = 2'-O-methyl modified nucleotide
  modified_base 82: mod_base = OTHER; note = 2'-O-methyl modified nucleotide
  modified_base 83: mod_base = OTHER; note = 2'-O-methyl modified nucleotide
  modified_base 84: mod_base = OTHER; note = 2'-O-methyl modified nucleotide
  modified_base 85: mod_base = OTHER; note = 2'-O-methyl modified nucleotide
  modified_base 86: mod_base = OTHER; note = 2'-O-methyl modified nucleotide
  modified_base 87: mod_base = OTHER; note = 2'-O-methyl modified nucleotide
  modified_base 88: mod_base = OTHER; note = 2'-O-methyl modified nucleotide
  modified_base 89: mod_base = OTHER; note = 2'-O-methyl modified nucleotide
  modified_base 90: mod_base = OTHER; note = 2'-O-methyl modified nucleotide
  modified_base 91: mod_base = OTHER; note = 2'-O-methyl modified nucleotide
  modified_base 92: mod_base = OTHER; note = 2'-O-methyl modified nucleotide
  modified_base 93: mod_base = OTHER; note = 2'-O-methyl modified nucleotide
  modified_base 94: mod_base = OTHER; note = 2'-O-methyl modified nucleotide
  modified_base 95: mod_base = OTHER; note = 2'-O-methyl modified nucleotide
  modified_base 96: mod_base = OTHER; note = 2'-O-methyl modified nucleotide
  modified_base 113: mod_base = OTHER; note = Nucleotide with phosphorothioate linkage
  modified_base 114: mod_base = OTHER; note = 2'-O-methyl modified nucleotide with phosphorothioate linkage
  modified_base 115: mod_base = OTHER; note = 2'-O-methyl modified nucleotide with phosphorothioate linkage
  modified_base 116: mod_base = OTHER; note = 2'-O-methyl modified nucleotide
gctggtacacggcagggtcagttttagagctagaaatagcaagttaaaataaggctagtccgttatcaacttgaaaaagtggcaccgagtcggtgctccagtgaccctgccgtgta

SEQ ID NO: 16675 - RNA, 115 nt, synthetic construct
  source 1..115: mol_type = other RNA
  modified_base 1: mod_base = OTHER; note = 2'-O-methyl modified nucleotide with phosphorothioate linkage
  modified_base 2: mod_base = OTHER; note = 2'-O-methyl modified nucleotide with phosphorothioate linkage
  modified_base 3: mod_base = OTHER; note = 2'-O-methyl modified nucleotide with phosphorothioate linkage
  modified_base 29: mod_base = OTHER; note = 2'-O-methyl modified nucleotide
  modified_base 30: mod_base = OTHER; note = 2'-O-methyl modified nucleotide
  modified_base 31: mod_base = OTHER; note = 2'-O-methyl modified nucleotide
  modified_base 32: mod_base = OTHER; note = 2'-O-methyl modified nucleotide
  modified_base 33: mod_base = OTHER; note = 2'-O-methyl modified nucleotide
  modified_base 34: mod_base = OTHER; note = 2'-O-methyl modified nucleotide
  modified_base 35: mod_base = OTHER; note = 2'-O-methyl modified nucleotide
  modified_base 36: mod_base = OTHER; note = 2'-O-methyl modified nucleotide
  modified_base 37: mod_base = OTHER; note = 2'-O-methyl modified nucleotide
  modified_base 38: mod_base = OTHER; note = 2'-O-methyl modified nucleotide
  modified_base 39: mod_base = OTHER; note = 2'-O-methyl modified nucleotide
  modified_base 40: mod_base = OTHER; note = 2'-O-methyl modified nucleotide
  modified_base 69: mod_base = OTHER; note = 2'-O-methyl modified nucleotide
  modified_base 70: mod_base = OTHER; note = 2'-O-methyl modified nucleotide
  modified_base 71: mod_base = OTHER; note = 2'-O-methyl modified nucleotide
  modified_base 72: mod_base = OTHER; note = 2'-O-methyl modified nucleotide
  modified_base 73: mod_base = OTHER; note = 2'-O-methyl modified nucleotide
  modified_base 74: mod_base = OTHER; note = 2'-O-methyl modified nucleotide
  modified_base 75: mod_base = OTHER; note = 2'-O-methyl modified nucleotide
  modified_base 76: mod_base = OTHER; note = 2'-O-methyl modified nucleotide
  modified_base 77: mod_base = OTHER; note = 2'-O-methyl modified nucleotide
  modified_base 78: mod_base = OTHER; note = 2'-O-methyl modified nucleotide
  modified_base 79: mod_base = OTHER; note = 2'-O-methyl modified nucleotide
  modified_base 80: mod_base = OTHER; note = 2'-O-methyl modified nucleotide
  modified_base 81: mod_base = OTHER; note = 2'-O-methyl modified nucleotide
  modified_base 82: mod_base = OTHER; note = 2'-O-methyl modified nucleotide
  modified_base 83: mod_base = OTHER; note = 2'-O-methyl modified nucleotide
  modified_base 84: mod_base = OTHER; note = 2'-O-methyl modified nucleotide
  modified_base 85: mod_base = OTHER; note = 2'-O-methyl modified nucleotide
  modified_base 86: mod_base = OTHER; note = 2'-O-methyl modified nucleotide
  modified_base 87: mod_base = OTHER; note = 2'-O-methyl modified nucleotide
  modified_base 88: mod_base = OTHER; note = 2'-O-methyl modified nucleotide
  modified_base 89: mod_base = OTHER; note = 2'-O-methyl modified nucleotide
  modified_base 90: mod_base = OTHER; note = 2'-O-methyl modified nucleotide
  modified_base 91: mod_base = OTHER; note = 2'-O-methyl modified nucleotide
  modified_base 92: mod_base = OTHER; note = 2'-O-methyl modified nucleotide
  modified_base 93: mod_base = OTHER; note = 2'-O-methyl modified nucleotide
  modified_base 94: mod_base = OTHER; note = 2'-O-methyl modified nucleotide
  modified_base 95: mod_base = OTHER; note = 2'-O-methyl modified nucleotide
  modified_base 96: mod_base = OTHER; note = 2'-O-methyl modified nucleotide
  modified_base 112: mod_base = OTHER; note = Nucleotide with phosphorothioate linkage
  modified_base 113: mod_base = OTHER; note = 2'-O-methyl modified nucleotide with phosphorothioate linkage
  modified_base 114: mod_base = OTHER; note = 2'-O-methyl modified nucleotide with phosphorothioate linkage
  modified_base 115: mod_base = OTHER; note = 2'-O-methyl modified nucleotide
gctggtacacggcagggtcagttttagagctagaaatagcaagttaaaataaggctagtccgttatcaacttgaaaaagtggcaccgagtcggtgctccagtgaccctgccgtgt

SEQ ID NO: 16676 - RNA, 114 nt, synthetic construct
  source 1..114: mol_type = other RNA
  modified_base 1: mod_base = OTHER; note = 2'-O-methyl modified nucleotide with phosphorothioate linkage
  modified_base 2: mod_base = OTHER; note = 2'-O-methyl modified nucleotide with phosphorothioate linkage
  modified_base 3: mod_base = OTHER; note = 2'-O-methyl modified nucleotide with phosphorothioate linkage
  modified_base 29: mod_base = OTHER; note = 2'-O-methyl modified nucleotide
  modified_base 30: mod_base = OTHER; note = 2'-O-methyl modified nucleotide
  modified_base 31: mod_base = OTHER; note = 2'-O-methyl modified nucleotide
  modified_base 32: mod_base = OTHER; note = 2'-O-methyl modified nucleotide
  modified_base 33: mod_base = OTHER; note = 2'-O-methyl modified nucleotide
  modified_base 34: mod_base = OTHER; note = 2'-O-methyl modified nucleotide
  modified_base 35: mod_base = OTHER; note = 2'-O-methyl modified nucleotide
  modified_base 36: mod_base = OTHER; note = 2'-O-methyl modified nucleotide
  modified_base 37: mod_base = OTHER; note = 2'-O-methyl modified nucleotide
  modified_base 38: mod_base = OTHER; note = 2'-O-methyl modified nucleotide
  modified_base 39: mod_base = OTHER; note = 2'-O-methyl modified nucleotide
  modified_base 40: mod_base = OTHER; note = 2'-O-methyl modified nucleotide
  modified_base 69: mod_base = OTHER; note = 2'-O-methyl modified nucleotide
  modified_base 70: mod_base = OTHER; note = 2'-O-methyl modified nucleotide
  modified_base 71: mod_base = OTHER; note = 2'-O-methyl modified nucleotide
  modified_base 72: mod_base = OTHER; note = 2'-O-methyl modified nucleotide
  modified_base 73: mod_base = OTHER; note = 2'-O-methyl modified nucleotide
  modified_base 74: mod_base = OTHER; note = 2'-O-methyl modified nucleotide
  modified_base 75: mod_base = OTHER; note = 2'-O-methyl modified nucleotide
  modified_base 76: mod_base = OTHER; note = 2'-O-methyl modified nucleotide
  modified_base 77: mod_base = OTHER; note = 2'-O-methyl modified nucleotide
  modified_base 78: mod_base = OTHER; note = 2'-O-methyl modified nucleotide
  modified_base 79: mod_base = OTHER; note = 2'-O-methyl modified nucleotide
  modified_base 80: mod_base = OTHER; note = 2'-O-methyl modified nucleotide
  modified_base 81: mod_base = OTHER; note = 2'-O-methyl modified nucleotide
  modified_base 82: mod_base = OTHER; note = 2'-O-methyl modified nucleotide
  modified_base 83: mod_base = OTHER; note = 2'-O-methyl modified nucleotide
  modified_base 84: mod_base = OTHER; note = 2'-O-methyl modified nucleotide
  modified_base 85: mod_base = OTHER; note = 2'-O-methyl modified nucleotide
  modified_base 86: mod_base = OTHER; note = 2'-O-methyl modified nucleotide
  modified_base 87: mod_base = OTHER; note = 2'-O-methyl modified nucleotide
  modified_base 88: mod_base = OTHER; note = 2'-O-methyl modified nucleotide
  modified_base 89: mod_base = OTHER; note = 2'-O-methyl modified nucleotide
  modified_base 90: mod_base = OTHER; note = 2'-O-methyl modified nucleotide
  modified_base 91: mod_base = OTHER; note = 2'-O-methyl modified nucleotide
  modified_base 92: mod_base = OTHER; note = 2'-O-methyl modified nucleotide
  modified_base 93: mod_base = OTHER; note = 2'-O-methyl modified nucleotide
  modified_base 94: mod_base = OTHER; note = 2'-O-methyl modified nucleotide
  modified_base 95: mod_base = OTHER; note = 2'-O-methyl modified nucleotide
  modified_base 96: mod_base = OTHER; note = 2'-O-methyl modified nucleotide
  modified_base 111: mod_base = OTHER; note = Nucleotide with phosphorothioate linkage
  modified_base 112: mod_base = OTHER; note = 2'-O-methyl modified nucleotide with phosphorothioate linkage
  modified_base 113: mod_base = OTHER; note = 2'-O-methyl modified nucleotide with phosphorothioate linkage
  modified_base 114: mod_base = OTHER; note = 2'-O-methyl modified nucleotide
gctggtacacggcagggtcagttttagagctagaaatagcaagttaaaataaggctagtccgttatcaacttgaaaaagtggcaccgagtcggtgctccagtgaccctgccgtg

SEQ ID NO: 16677 - RNA, 113 nt, synthetic construct
  source 1..113: mol_type = other RNA
  modified_base 1: mod_base = OTHER; note = 2'-O-methyl modified nucleotide with phosphorothioate linkage
  modified_base 2: mod_base = OTHER; note = 2'-O-methyl modified nucleotide with phosphorothioate linkage
  modified_base 3: mod_base = OTHER; note = 2'-O-methyl modified nucleotide with phosphorothioate linkage
  modified_base 29: mod_base = OTHER; note = 2'-O-methyl modified nucleotide
  modified_base 30: mod_base = OTHER; note = 2'-O-methyl modified nucleotide
  modified_base 31: mod_base = OTHER; note = 2'-O-methyl modified nucleotide
  modified_base 32: mod_base = OTHER; note = 2'-O-methyl modified nucleotide
  modified_base 33: mod_base = OTHER; note = 2'-O-methyl modified nucleotide
  modified_base 34: mod_base = OTHER; note = 2'-O-methyl modified nucleotide
  modified_base 35: mod_base = OTHER; note = 2'-O-methyl modified nucleotide
  modified_base 36: mod_base = OTHER; note = 2'-O-methyl modified nucleotide
  modified_base 37: mod_base = OTHER; note = 2'-O-methyl modified nucleotide
  modified_base 38: mod_base = OTHER; note = 2'-O-methyl modified nucleotide
  modified_base 39: mod_base = OTHER; note = 2'-O-methyl modified nucleotide
  modified_base 40: mod_base = OTHER; note = 2'-O-methyl modified nucleotide
  modified_base 69: mod_base = OTHER; note = 2'-O-methyl modified nucleotide
  modified_base 70: mod_base = OTHER; note = 2'-O-methyl modified nucleotide
  modified_base 71: mod_base = OTHER; note = 2'-O-methyl modified nucleotide
  modified_base 72: mod_base = OTHER; note = 2'-O-methyl modified nucleotide
  modified_base 73: mod_base = OTHER; note = 2'-O-methyl modified nucleotide
  modified_base 74: mod_base = OTHER; note = 2'-O-methyl modified nucleotide
  modified_base 75: mod_base = OTHER; note = 2'-O-methyl modified nucleotide
  modified_base 76: mod_base = OTHER; note = 2'-O-methyl modified nucleotide
  modified_base 77: mod_base = OTHER; note = 2'-O-methyl modified nucleotide
  modified_base 78: mod_base = OTHER; note = 2'-O-methyl modified nucleotide
  modified_base 79: mod_base = OTHER; note = 2'-O-methyl modified nucleotide
  modified_base 80: mod_base = OTHER; note = 2'-O-methyl modified nucleotide
  modified_base 81: mod_base = OTHER; note = 2'-O-methyl modified nucleotide
  modified_base 82: mod_base = OTHER; note = 2'-O-methyl modified nucleotide
  modified_base 83: mod_base = OTHER; note = 2'-O-methyl modified nucleotide
  modified_base 84: mod_base = OTHER; note = 2'-O-methyl modified nucleotide
  modified_base 85: mod_base = OTHER; note = 2'-O-methyl modified nucleotide
  modified_base 86: mod_base = OTHER; note = 2'-O-methyl modified nucleotide
  modified_base 87: mod_base = OTHER; note = 2'-O-methyl modified nucleotide
  modified_base 88: mod_base = OTHER; note = 2'-O-methyl modified nucleotide
  modified_base 89: mod_base = OTHER; note = 2'-O-methyl modified nucleotide
  modified_base 90: mod_base = OTHER; note = 2'-O-methyl modified nucleotide
  modified_base 91: mod_base = OTHER; note = 2'-O-methyl modified nucleotide
  modified_base 92: mod_base = OTHER; note = 2'-O-methyl modified nucleotide
  modified_base 93: mod_base = OTHER; note = 2'-O-methyl modified nucleotide
  modified_base 94: mod_base = OTHER; note = 2'-O-methyl modified nucleotide
  modified_base 95: mod_base = OTHER; note = 2'-O-methyl modified nucleotide
  modified_base 96: mod_base = OTHER; note = 2'-O-methyl modified nucleotide
  modified_base 110: mod_base = OTHER; note = Nucleotide with phosphorothioate linkage
  modified_base 111: mod_base = OTHER; note = 2'-O-methyl modified nucleotide with phosphorothioate linkage
  modified_base 112: mod_base = OTHER; note = 2'-O-methyl modified nucleotide with phosphorothioate linkage
  modified_base 113: mod_base = OTHER; note = 2'-O-methyl modified nucleotide
gctggtacacggcagggtcagttttagagctagaaatagcaagttaaaataaggctagtccgttatcaacttgaaaaagtggcaccgagtcggtgctccagtgaccctgccgt

SEQ ID NO: 16678 - RNA, 112 nt, synthetic construct
  source 1..112: mol_type = other RNA
  modified_base 1: mod_base = OTHER; note = 2'-O-methyl modified nucleotide with phosphorothioate linkage
  modified_base 2: mod_base = OTHER; note = 2'-O-methyl modified nucleotide with phosphorothioate linkage
  modified_base 3: mod_base = OTHER; note = 2'-O-methyl modified nucleotide with phosphorothioate linkage
  modified_base 29: mod_base = OTHER; note = 2'-O-methyl modified nucleotide
  modified_base 30: mod_base = OTHER; note = 2'-O-methyl modified nucleotide
  modified_base 31: mod_base = OTHER; note = 2'-O-methyl modified nucleotide
  modified_base 32: mod_base = OTHER; note = 2'-O-methyl modified nucleotide
  modified_base 33: mod_base = OTHER; note = 2'-O-methyl modified nucleotide
  modified_base 34: mod_base = OTHER; note = 2'-O-methyl modified nucleotide
  modified_base 35: mod_base = OTHER; note = 2'-O-methyl modified nucleotide
  modified_base 36: mod_base = OTHER; note = 2'-O-methyl modified nucleotide
  modified_base 37: mod_base = OTHER; note = 2'-O-methyl modified nucleotide
  modified_base 38: mod_base = OTHER; note = 2'-O-methyl modified nucleotide
  modified_base 39: mod_base = OTHER; note = 2'-O-methyl modified nucleotide
  modified_base 40: mod_base = OTHER; note = 2'-O-methyl modified nucleotide
  modified_base 69: mod_base = OTHER; note = 2'-O-methyl modified nucleotide
  modified_base 70: mod_base = OTHER; note = 2'-O-methyl modified nucleotide
  modified_base 71: mod_base = OTHER; note = 2'-O-methyl modified nucleotide
  modified_base 72: mod_base = OTHER; note = 2'-O-methyl modified nucleotide
  modified_base 73: mod_base = OTHER; note = 2'-O-methyl modified nucleotide
  modified_base 74: mod_base = OTHER; note = 2'-O-methyl modified nucleotide
  modified_base 75: mod_base = OTHER; note = 2'-O-methyl modified nucleotide
  modified_base 76: mod_base = OTHER; note = 2'-O-methyl modified nucleotide
  modified_base 77: mod_base = OTHER; note = 2'-O-methyl modified nucleotide
  modified_base 78: mod_base = OTHER; note = 2'-O-methyl modified nucleotide
  modified_base 79: mod_base = OTHER; note = 2'-O-methyl modified nucleotide
  modified_base 80: mod_base = OTHER; note = 2'-O-methyl modified nucleotide
  modified_base 81: mod_base = OTHER; note = 2'-O-methyl modified nucleotide
  modified_base 82: mod_base = OTHER; note = 2'-O-methyl modified nucleotide
  modified_base 83: mod_base = OTHER; note = 2'-O-methyl modified nucleotide
  modified_base 84: mod_base = OTHER; note = 2'-O-methyl modified nucleotide
  modified_base 85: mod_base = OTHER; note = 2'-O-methyl modified nucleotide
  modified_base 86: mod_base = OTHER; note = 2'-O-methyl modified nucleotide
  modified_base 87: mod_base = OTHER; note = 2'-O-methyl modified nucleotide
  modified_base 88: mod_base = OTHER; note = 2'-O-methyl modified nucleotide
  modified_base 89: mod_base = OTHER; note = 2'-O-methyl modified nucleotide
  modified_base 90: mod_base = OTHER; note = 2'-O-methyl modified nucleotide
  modified_base 91: mod_base = OTHER; note = 2'-O-methyl modified nucleotide
  modified_base 92: mod_base = OTHER; note = 2'-O-methyl modified nucleotide
  modified_base 93: mod_base = OTHER; note = 2'-O-methyl modified nucleotide
  modified_base 94: mod_base = OTHER; note = 2'-O-methyl modified nucleotide
  modified_base 95: mod_base = OTHER; note = 2'-O-methyl modified nucleotide
  modified_base 96: mod_base = OTHER; note = 2'-O-methyl modified nucleotide
  modified_base 109: mod_base = OTHER; note = Nucleotide with phosphorothioate linkage
  modified_base 110: mod_base = OTHER; note = 2'-O-methyl modified nucleotide with phosphorothioate linkage
  modified_base 111: mod_base = OTHER; note = 2'-O-methyl modified nucleotide with phosphorothioate linkage
  modified_base 112: mod_base = OTHER; note = 2'-O-methyl modified nucleotide
gctggtacacggcagggtcagttttagagctagaaatagcaagttaaaataaggctagtccgttatcaacttgaaaaagtggcaccgagtcggtgctccagtgaccctgccg

SEQ ID NO: 16679 - RNA, 119 nt, synthetic construct
  source 1..119: mol_type = other RNA
  modified_base 1: mod_base = OTHER; note = 2'-O-methyl modified nucleotide with phosphorothioate linkage
  modified_base 2: mod_base = OTHER; note = 2'-O-methyl modified nucleotide with phosphorothioate linkage
  modified_base 3: mod_base = OTHER; note = 2'-O-methyl modified nucleotide with phosphorothioate linkage
  modified_base 29: mod_base = OTHER; note = 2'-O-methyl modified nucleotide
  modified_base 30: mod_base = OTHER; note = 2'-O-methyl modified nucleotide
  modified_base 31: mod_base = OTHER; note = 2'-O-methyl modified nucleotide
  modified_base 32: mod_base = OTHER; note = 2'-O-methyl modified nucleotide
  modified_base 33: mod_base = OTHER; note = 2'-O-methyl modified nucleotide
  modified_base 34: mod_base = OTHER; note = 2'-O-methyl modified nucleotide
  modified_base 35: mod_base = OTHER; note = 2'-O-methyl modified nucleotide
  modified_base 36: mod_base = OTHER; note = 2'-O-methyl modified nucleotide
  modified_base 37: mod_base = OTHER; note = 2'-O-methyl modified nucleotide
  modified_base 38: mod_base = OTHER; note = 2'-O-methyl modified nucleotide
  modified_base 39: mod_base = OTHER; note = 2'-O-methyl modified nucleotide
  modified_base 40: mod_base = OTHER; note = 2'-O-methyl modified nucleotide
  modified_base 69: mod_base = OTHER; note = 2'-O-methyl modified nucleotide
  modified_base 70: mod_base = OTHER; note = 2'-O-methyl modified nucleotide
  modified_base 71: mod_base = OTHER; note = 2'-O-methyl modified nucleotide
  modified_base 72: mod_base = OTHER; note = 2'-O-methyl modified nucleotide
  modified_base 73: mod_base = OTHER; note = 2'-O-methyl modified nucleotide
  modified_base 74: mod_base = OTHER; note = 2'-O-methyl modified nucleotide
  modified_base 75: mod_base = OTHER; note = 2'-O-methyl modified nucleotide
  modified_base 76: mod_base = OTHER; note = 2'-O-methyl modified nucleotide
  modified_base 77: mod_base = OTHER; note = 2'-O-methyl modified nucleotide
  modified_base 78: mod_base = OTHER; note = 2'-O-methyl modified nucleotide
  modified_base 79: mod_base = OTHER; note = 2'-O-methyl modified nucleotide
  modified_base 80: mod_base = OTHER; note = 2'-O-methyl modified nucleotide
  modified_base 81: mod_base = OTHER; note = 2'-O-methyl modified nucleotide
  modified_base 82: mod_base = OTHER; note = 2'-O-methyl modified nucleotide
  modified_base 83: mod_base = OTHER; note = 2'-O-methyl modified nucleotide
  modified_base 84: mod_base = OTHER; note = 2'-O-methyl modified nucleotide
  modified_base 85: mod_base = OTHER; note = 2'-O-methyl modified nucleotide
  modified_base 86: mod_base = OTHER; note = 2'-O-methyl modified nucleotide
  modified_base 87: mod_base = OTHER; note = 2'-O-methyl modified nucleotide
  modified_base 88: mod_base = OTHER; note = 2'-O-methyl modified nucleotide
  modified_base 89: mod_base = OTHER; note = 2'-O-methyl modified nucleotide
  modified_base 90: mod_base = OTHER; note = 2'-O-methyl modified nucleotide
  modified_base 91: mod_base = OTHER; note = 2'-O-methyl modified nucleotide
  modified_base 92: mod_base = OTHER; note = 2'-O-methyl modified nucleotide
  modified_base 93: mod_base = OTHER; note = 2'-O-methyl modified nucleotide
  modified_base 94: mod_base = OTHER; note = 2'-O-methyl modified nucleotide
  modified_base 95: mod_base = OTHER; note = 2'-O-methyl modified nucleotide
  modified_base 96: mod_base = OTHER; note = 2'-O-methyl modified nucleotide
  modified_base 116: mod_base = OTHER; note = Nucleotide with phosphorothioate linkage
  modified_base 117: mod_base = OTHER; note = 2'-O-methyl modified nucleotide with phosphorothioate linkage
  modified_base 118: mod_base = OTHER; note = 2'-O-methyl modified nucleotide with phosphorothioate linkage
  modified_base 119: mod_base = OTHER; note = 2'-O-methyl modified nucleotide
gctggtacacggcagggtcagttttagagctagaaatagcaagttaaaataaggctagtccgttatcaacttgaaaaagtggcaccgagtcggtgctatccagtgaccctgccgtgtac

SEQ ID NO: 16680 - RNA, 118 nt, synthetic construct
  source 1..118: mol_type = other RNA
  modified_base 1: mod_base = OTHER; note = 2'-O-methyl modified nucleotide with phosphorothioate linkage
  modified_base 2: mod_base = OTHER; note = 2'-O-methyl modified nucleotide with phosphorothioate linkage
  modified_base 3: mod_base = OTHER; note = 2'-O-methyl modified nucleotide with phosphorothioate linkage
  modified_base 29: mod_base = OTHER; note = 2'-O-methyl modified nucleotide
  modified_base 30: mod_base = OTHER; note = 2'-O-methyl modified nucleotide
  modified_base 31: mod_base = OTHER; note = 2'-O-methyl modified nucleotide
  modified_base 32: mod_base = OTHER; note = 2'-O-methyl modified nucleotide
  modified_base 33: mod_base = OTHER; note = 2'-O-methyl modified nucleotide
  modified_base 34: mod_base = OTHER; note = 2'-O-methyl modified nucleotide
  modified_base 35: mod_base = OTHER; note = 2'-O-methyl modified nucleotide
  modified_base 36: mod_base = OTHER; note = 2'-O-methyl modified nucleotide
  modified_base 37: mod_base = OTHER; note = 2'-O-methyl modified nucleotide
  modified_base 38: mod_base = OTHER; note = 2'-O-methyl modified nucleotide
  modified_base 39: mod_base = OTHER; note = 2'-O-methyl modified nucleotide
  modified_base 40: mod_base = OTHER; note = 2'-O-methyl modified nucleotide
  modified_base 69: mod_base = OTHER; note = 2'-O-methyl modified nucleotide
  modified_base 70: mod_base = OTHER; note = 2'-O-methyl modified nucleotide
  modified_base 71: mod_base = OTHER; note = 2'-O-methyl modified nucleotide
  modified_base 72: mod_base = OTHER; note = 2'-O-methyl modified nucleotide
  modified_base 73: mod_base = OTHER; note = 2'-O-methyl modified nucleotide
  modified_base 74: mod_base = OTHER; note = 2'-O-methyl modified nucleotide
  modified_base 75: mod_base = OTHER; note = 2'-O-methyl modified nucleotide
  modified_base 76: mod_base = OTHER; note = 2'-O-methyl modified nucleotide
  modified_base 77: mod_base = OTHER; note = 2'-O-methyl modified nucleotide
  modified_base 78: mod_base = OTHER; note = 2'-O-methyl modified nucleotide
  modified_base 79: mod_base = OTHER; note = 2'-O-methyl modified nucleotide
  modified_base 80: mod_base = OTHER; note = 2'-O-methyl modified nucleotide
  modified_base 81: mod_base = OTHER; note = 2'-O-methyl modified nucleotide
  modified_base 82: mod_base = OTHER; note = 2'-O-methyl modified nucleotide
  modified_base 83: mod_base = OTHER; note = 2'-O-methyl modified nucleotide
  modified_base 84: mod_base = OTHER; note = 2'-O-methyl modified nucleotide
  modified_base 85: mod_base = OTHER; note = 2'-O-methyl modified nucleotide
  modified_base 86: mod_base = OTHER; note = 2'-O-methyl modified nucleotide
  modified_base 87: mod_base = OTHER; note = 2'-O-methyl modified nucleotide
  modified_base 88: mod_base = OTHER; note = 2'-O-methyl modified nucleotide
  modified_base 89: mod_base = OTHER; note = 2'-O-methyl modified nucleotide
  modified_base 90: mod_base = OTHER; note = 2'-O-methyl modified nucleotide
  modified_base 91: mod_base = OTHER; note = 2'-O-methyl modified nucleotide
  modified_base 92: mod_base = OTHER; note = 2'-O-methyl modified nucleotide
  modified_base 93: mod_base = OTHER; note = 2'-O-methyl modified nucleotide
  modified_base 94: mod_base = OTHER; note = 2'-O-methyl modified nucleotide
  modified_base 95: mod_base = OTHER; note = 2'-O-methyl modified nucleotide
  modified_base 96: mod_base = OTHER; note = 2'-O-methyl modified nucleotide
  modified_base 115: mod_base = OTHER; note = Nucleotide with phosphorothioate linkage
  modified_base 116: mod_base = OTHER; note = 2'-O-methyl modified nucleotide with phosphorothioate linkage
  modified_base 117: mod_base = OTHER; note = 2'-O-methyl modified nucleotide with phosphorothioate linkage
  modified_base 118: mod_base = OTHER; note = 2'-O-methyl modified nucleotide
gctggtacacggcagggtcagttttagagctagaaatagcaagttaaaataaggctagtccgttatcaacttgaaaaagtggcaccgagtcggtgctatccagtgaccctgccgtgta

SEQ ID NO: 16681 - RNA, 117 nt, synthetic construct
  source 1..117: mol_type = other RNA
  modified_base 1: mod_base = OTHER; note = 2'-O-methyl modified nucleotide with phosphorothioate linkage
  modified_base 2: mod_base = OTHER; note = 2'-O-methyl modified nucleotide with phosphorothioate linkage
  modified_base 3: mod_base = OTHER; note = 2'-O-methyl modified nucleotide with phosphorothioate linkage
  modified_base 29: mod_base = OTHER; note = 2'-O-methyl modified nucleotide
  modified_base 30: mod_base = OTHER; note = 2'-O-methyl modified nucleotide
  modified_base 31: mod_base = OTHER; note = 2'-O-methyl modified nucleotide
  modified_base 32: mod_base = OTHER; note = 2'-O-methyl modified nucleotide
  modified_base 33: mod_base = OTHER; note = 2'-O-methyl modified nucleotide
  modified_base 34: mod_base = OTHER; note = 2'-O-methyl modified nucleotide
  modified_base 35: mod_base = OTHER; note = 2'-O-methyl modified nucleotide
  modified_base 36: mod_base = OTHER; note = 2'-O-methyl modified nucleotide
  modified_base 37: mod_base = OTHER; note = 2'-O-methyl modified nucleotide
  modified_base 38: mod_base = OTHER; note = 2'-O-methyl modified nucleotide
  modified_base 39: mod_base = OTHER; note = 2'-O-methyl modified nucleotide
  modified_base 40: mod_base = OTHER; note = 2'-O-methyl modified nucleotide
  modified_base 69: mod_base = OTHER; note = 2'-O-methyl modified nucleotide
  modified_base 70: mod_base = OTHER; note = 2'-O-methyl modified nucleotide
  modified_base 71: mod_base = OTHER; note = 2'-O-methyl modified nucleotide
  modified_base 72: mod_base = OTHER; note = 2'-O-methyl modified nucleotide
  modified_base 73: mod_base = OTHER; note = 2'-O-methyl modified nucleotide
  modified_base 74: mod_base = OTHER; note = 2'-O-methyl modified nucleotide
  modified_base 75: mod_base = OTHER; note = 2'-O-methyl modified nucleotide
  modified_base 76: mod_base = OTHER; note = 2'-O-methyl modified nucleotide
  modified_base 77: mod_base = OTHER; note = 2'-O-methyl modified nucleotide
  modified_base 78: mod_base = OTHER; note = 2'-O-methyl modified nucleotide
  modified_base 79: mod_base = OTHER; note = 2'-O-methyl modified nucleotide
  modified_base 80: mod_base = OTHER; note = 2'-O-methyl modified nucleotide
  modified_base 81: mod_base = OTHER; note = 2'-O-methyl modified nucleotide
  modified_base 82: mod_base = OTHER; note = 2'-O-methyl modified nucleotide
  modified_base 83: mod_base = OTHER; note = 2'-O-methyl modified nucleotide
  modified_base 84: mod_base = OTHER; note = 2'-O-methyl modified nucleotide
  modified_base 85: mod_base = OTHER; note = 2'-O-methyl modified nucleotide
  modified_base 86: mod_base = OTHER; note = 2'-O-methyl modified nucleotide
  modified_base 87: mod_base = OTHER; note = 2'-O-methyl modified nucleotide
  modified_base 88: mod_base = OTHER; note = 2'-O-methyl modified nucleotide
  modified_base 89: mod_base = OTHER; note = 2'-O-methyl modified nucleotide
  modified_base 90: mod_base = OTHER; note = 2'-O-methyl modified nucleotide
  modified_base 91: mod_base = OTHER; note = 2'-O-methyl modified nucleotide
  modified_base 92: mod_base = OTHER; note = 2'-O-methyl modified nucleotide
  modified_base 93: mod_base = OTHER; note = 2'-O-methyl modified nucleotide
  modified_base 94: mod_base = OTHER; note = 2'-O-methyl modified nucleotide
  modified_base 95: mod_base = OTHER; note = 2'-O-methyl modified nucleotide
  modified_base 96: mod_base = OTHER; note = 2'-O-methyl modified nucleotide
  modified_base 114: mod_base = OTHER; note = Nucleotide with phosphorothioate linkage
  modified_base 115: mod_base = OTHER; note = 2'-O-methyl modified nucleotide with phosphorothioate linkage
  modified_base 116: mod_base = OTHER; note = 2'-O-methyl modified nucleotide with phosphorothioate linkage
  modified_base 117: mod_base = OTHER; note = 2'-O-methyl modified nucleotide
gctggtacacggcagggtcagttttagagctagaaatagcaagttaaaataaggctagtccgttatcaacttgaaaaagtggcaccgagtcggtgctatccagtgaccctgccgtgt

SEQ ID NO: 16682 - RNA, 116 nt, synthetic construct
  source 1..116: mol_type = other RNA
  modified_base 1: mod_base = OTHER; note = 2'-O-methyl modified nucleotide with phosphorothioate linkage
  modified_base 2: mod_base = OTHER; note = 2'-O-methyl modified nucleotide with phosphorothioate linkage
  modified_base 3: mod_base = OTHER; note = 2'-O-methyl modified nucleotide with phosphorothioate linkage
  modified_base 29: mod_base = OTHER; note = 2'-O-methyl modified nucleotide
  modified_base 30: mod_base = OTHER; note = 2'-O-methyl modified nucleotide
  modified_base 31: mod_base = OTHER; note = 2'-O-methyl modified nucleotide
  modified_base 32: mod_base = OTHER; note = 2'-O-methyl modified nucleotide
  modified_base 33: mod_base = OTHER; note = 2'-O-methyl modified nucleotide
  modified_base 34: mod_base = OTHER; note = 2'-O-methyl modified nucleotide
  modified_base 35: mod_base = OTHER; note = 2'-O-methyl modified nucleotide
  modified_base 36: mod_base = OTHER; note = 2'-O-methyl modified nucleotide
  modified_base 37: mod_base = OTHER; note = 2'-O-methyl modified nucleotide
  modified_base 38: mod_base = OTHER; note = 2'-O-methyl modified nucleotide
  modified_base 39: mod_base = OTHER; note = 2'-O-methyl modified nucleotide
  modified_base 40: mod_base = OTHER; note = 2'-O-methyl modified nucleotide
  modified_base 69: mod_base = OTHER; note = 2'-O-methyl modified nucleotide
  modified_base 70: mod_base = OTHER; note = 2'-O-methyl modified nucleotide
  modified_base 71: mod_base = OTHER; note = 2'-O-methyl modified nucleotide
  modified_base 72: mod_base = OTHER; note = 2'-O-methyl modified nucleotide
  modified_base 73: mod_base = OTHER; note = 2'-O-methyl modified nucleotide
  modified_base 74: mod_base = OTHER; note = 2'-O-methyl modified nucleotide
  modified_base 75: mod_base = OTHER; note = 2'-O-methyl modified nucleotide
  modified_base 76: mod_base = OTHER; note = 2'-O-methyl modified nucleotide
  modified_base 77: mod_base = OTHER; note = 2'-O-methyl modified nucleotide
  modified_base 78: mod_base = OTHER; note = 2'-O-methyl modified nucleotide
  modified_base 79: mod_base = OTHER; note = 2'-O-methyl modified nucleotide
  modified_base 80: mod_base = OTHER; note = 2'-O-methyl modified nucleotide
  modified_base 81: mod_base = OTHER; note = 2'-O-methyl modified nucleotide
  modified_base 82: mod_base = OTHER; note = 2'-O-methyl modified nucleotide
  modified_base 83: mod_base = OTHER; note = 2'-O-methyl modified nucleotide
  modified_base 84: mod_base = OTHER; note = 2'-O-methyl modified nucleotide
  modified_base 85: mod_base = OTHER; note = 2'-O-methyl modified nucleotide
  modified_base 86: mod_base = OTHER; note = 2'-O-methyl modified nucleotide
  modified_base 87: mod_base = OTHER; note = 2'-O-methyl modified nucleotide
  modified_base 88: mod_base = OTHER; note = 2'-O-methyl modified nucleotide
  modified_base 89: mod_base = OTHER; note = 2'-O-methyl modified nucleotide
  modified_base 90: mod_base = OTHER; note = 2'-O-methyl modified nucleotide
  modified_base 91: mod_base = OTHER; note = 2'-O-methyl modified nucleotide
  modified_base 92: mod_base = OTHER; note = 2'-O-methyl modified nucleotide
  modified_base 93: mod_base = OTHER; note = 2'-O-methyl modified nucleotide
  modified_base 94: mod_base = OTHER; note = 2'-O-methyl modified nucleotide
  modified_base 95: mod_base = OTHER; note = 2'-O-methyl modified nucleotide
  modified_base 96: mod_base = OTHER; note = 2'-O-methyl modified nucleotide
  modified_base 113: mod_base = OTHER; note = Nucleotide with phosphorothioate linkage
  modified_base 114: mod_base = OTHER; note = 2'-O-methyl modified nucleotide with phosphorothioate linkage
  modified_base 115: mod_base = OTHER; note = 2'-O-methyl modified nucleotide with phosphorothioate linkage
  modified_base 116: mod_base = OTHER; note = 2'-O-methyl modified nucleotide
gctggtacacggcagggtcagttttagagctagaaatagcaagttaaaataaggctagtccgttatcaacttgaaaaagtggcaccgagtcggtgctatccagtgaccctgccgtg

SEQ ID NO: 16683 - RNA, 115 nt, synthetic construct
  source 1..115: mol_type = other RNA
  modified_base 1: mod_base = OTHER; note = 2'-O-methyl modified nucleotide with phosphorothioate linkage
  modified_base 2: mod_base = OTHER; note = 2'-O-methyl modified nucleotide with phosphorothioate linkage
  modified_base 3: mod_base = OTHER; note = 2'-O-methyl modified nucleotide with phosphorothioate linkage
  modified_base 29: mod_base = OTHER; note = 2'-O-methyl modified nucleotide
  modified_base 30: mod_base = OTHER; note = 2'-O-methyl modified nucleotide
  modified_base 31: mod_base = OTHER; note = 2'-O-methyl modified nucleotide
  modified_base 32: mod_base = OTHER; note = 2'-O-methyl modified nucleotide
  modified_base 33: mod_base = OTHER; note = 2'-O-methyl modified nucleotide
  modified_base 34: mod_base = OTHER; note = 2'-O-methyl modified nucleotide
  modified_base 35: mod_base = OTHER; note = 2'-O-methyl modified nucleotide
  modified_base 36: mod_base = OTHER; note = 2'-O-methyl modified nucleotide
  modified_base 37: mod_base = OTHER; note = 2'-O-methyl modified nucleotide
  modified_base 38: mod_base = OTHER; note = 2'-O-methyl modified nucleotide
  modified_base 39: mod_base = OTHER; note = 2'-O-methyl modified nucleotide
  modified_base 40: mod_base = OTHER; note = 2'-O-methyl modified nucleotide
  modified_base 69: mod_base = OTHER; note = 2'-O-methyl modified nucleotide
  modified_base 70: mod_base = OTHER; note = 2'-O-methyl modified nucleotide
  modified_base 71: mod_base = OTHER; note = 2'-O-methyl modified nucleotide
  modified_base 72: mod_base = OTHER; note = 2'-O-methyl modified nucleotide
  modified_base 73: mod_base = OTHER; note = 2'-O-methyl modified nucleotide
  modified_base 74: mod_base = OTHER; note = 2'-O-methyl modified nucleotide
  modified_base 75: mod_base = OTHER; note = 2'-O-methyl modified nucleotide
  modified_base 76: mod_base = OTHER; note = 2'-O-methyl modified nucleotide
  modified_base 77: mod_base = OTHER; note = 2'-O-methyl modified nucleotide
  modified_base 78: mod_base = OTHER; note = 2'-O-methyl modified nucleotide
  modified_base 79: mod_base = OTHER; note = 2'-O-methyl modified nucleotide
  modified_base 80: mod_base = OTHER; note = 2'-O-methyl modified nucleotide
  modified_base 81: mod_base = OTHER; note = 2'-O-methyl modified nucleotide
  modified_base 82: mod_base = OTHER; note = 2'-O-methyl modified nucleotide
  modified_base 83: mod_base = OTHER; note = 2'-O-methyl modified nucleotide
  modified_base 84: mod_base = OTHER; note = 2'-O-methyl modified nucleotide
  modified_base 85: mod_base = OTHER; note = 2'-O-methyl modified nucleotide
  modified_base 86: mod_base = OTHER; note = 2'-O-methyl modified nucleotide
  modified_base 87: mod_base = OTHER; note = 2'-O-methyl modified nucleotide
  modified_base 88: mod_base = OTHER; note = 2'-O-methyl modified nucleotide
  modified_base 89: mod_base = OTHER; note = 2'-O-methyl modified nucleotide
  modified_base 90: mod_base = OTHER; note = 2'-O-methyl modified nucleotide
  modified_base 91: mod_base = OTHER; note = 2'-O-methyl modified nucleotide
  modified_base 92: mod_base = OTHER; note = 2'-O-methyl modified nucleotide
  modified_base 93: mod_base = OTHER; note = 2'-O-methyl modified nucleotide
  modified_base 94: mod_base = OTHER; note = 2'-O-methyl modified nucleotide
  modified_base 95: mod_base = OTHER; note = 2'-O-methyl modified nucleotide
  modified_base 96: mod_base = OTHER; note = 2'-O-methyl modified nucleotide
  modified_base 112: mod_base = OTHER; note = Nucleotide with phosphorothioate linkage
  modified_base 113: mod_base = OTHER; note = 2'-O-methyl modified nucleotide with phosphorothioate linkage
  modified_base 114: mod_base = OTHER; note = 2'-O-methyl modified nucleotide with phosphorothioate linkage
  modified_base 115: mod_base = OTHER; note = 2'-O-methyl modified nucleotide
gctggtacacggcagggtcagttttagagctagaaatagcaagttaaaataaggctagtccgttatcaacttgaaaaagtggcaccgagtcggtgctatccagtgaccctgccgt

SEQ ID NO: 16684 - RNA, 114 nt, synthetic construct
  source 1..114: mol_type = other RNA
  modified_base 1: mod_base = OTHER; note = 2'-O-methyl modified nucleotide with phosphorothioate linkage
  modified_base 2: mod_base = OTHER; note = 2'-O-methyl modified nucleotide with phosphorothioate linkage
  modified_base 3: mod_base = OTHER; note = 2'-O-methyl modified nucleotide with phosphorothioate linkage
  modified_base 29: mod_base = OTHER; note = 2'-O-methyl modified nucleotide
  modified_base 30: mod_base = OTHER; note = 2'-O-methyl modified nucleotide
  modified_base 31: mod_base = OTHER; note = 2'-O-methyl modified nucleotide
  modified_base 32: mod_base = OTHER; note = 2'-O-methyl modified nucleotide
  modified_base 33: mod_base = OTHER; note = 2'-O-methyl modified nucleotide
  modified_base 34: mod_base = OTHER; note = 2'-O-methyl modified nucleotide
  modified_base 35: mod_base = OTHER; note = 2'-O-methyl modified nucleotide
  modified_base 36: mod_base = OTHER; note = 2'-O-methyl modified nucleotide
  modified_base 37: mod_base = OTHER; note = 2'-O-methyl modified nucleotide
  modified_base 38: mod_base = OTHER; note = 2'-O-methyl modified nucleotide
  modified_base 39: mod_base = OTHER; note = 2'-O-methyl modified nucleotide
  modified_base 40: mod_base = OTHER; note = 2'-O-methyl modified nucleotide
  modified_base 69: mod_base = OTHER; note = 2'-O-methyl modified nucleotide
  modified_base 70: mod_base = OTHER; note = 2'-O-methyl modified nucleotide
  modified_base 71: mod_base = OTHER; note = 2'-O-methyl modified nucleotide
  modified_base 72: mod_base = OTHER; note = 2'-O-methyl modified nucleotide
  modified_base 73: mod_base = OTHER; note = 2'-O-methyl modified nucleotide
  modified_base 74: mod_base = OTHER; note = 2'-O-methyl modified nucleotide
  modified_base 75: mod_base = OTHER; note = 2'-O-methyl modified nucleotide
  modified_base 76: mod_base = OTHER; note = 2'-O-methyl modified nucleotide
  modified_base 77: mod_base = OTHER; note = 2'-O-methyl modified nucleotide
  modified_base 78: mod_base = OTHER; note = 2'-O-methyl modified nucleotide
  modified_base 79: mod_base = OTHER; note = 2'-O-methyl modified nucleotide
  modified_base 80: mod_base = OTHER; note = 2'-O-methyl modified nucleotide
  modified_base 81: mod_base = OTHER; note = 2'-O-methyl modified nucleotide
  modified_base 82: mod_base = OTHER; note = 2'-O-methyl modified nucleotide
  modified_base 83: mod_base = OTHER; note = 2'-O-methyl modified nucleotide
  modified_base 84: mod_base = OTHER; note = 2'-O-methyl modified nucleotide
  modified_base 85: mod_base = OTHER; note = 2'-O-methyl modified nucleotide
  modified_base 86: mod_base = OTHER; note = 2'-O-methyl modified nucleotide
  modified_base 87: mod_base = OTHER; note = 2'-O-methyl modified nucleotide
  modified_base 88: mod_base = OTHER; note = 2'-O-methyl modified nucleotide
  modified_base 89: mod_base = OTHER; note = 2'-O-methyl modified nucleotide
  modified_base 90: mod_base = OTHER; note = 2'-O-methyl modified nucleotide
  modified_base 91: mod_base = OTHER; note = 2'-O-methyl modified nucleotide
  modified_base 92: mod_base = OTHER; note = 2'-O-methyl modified nucleotide
  modified_base 93: mod_base = OTHER; note = 2'-O-methyl modified nucleotide
  modified_base 94: mod_base = OTHER; note = 2'-O-methyl modified nucleotide
  modified_base 95: mod_base = OTHER; note = 2'-O-methyl modified nucleotide
  modified_base 96: mod_base = OTHER; note = 2'-O-methyl modified nucleotide
  modified_base 111: mod_base = OTHER; note = Nucleotide with phosphorothioate linkage
  modified_base 112: mod_base = OTHER; note = 2'-O-methyl modified nucleotide with phosphorothioate linkage
  modified_base 113: mod_base = OTHER; note = 2'-O-methyl modified nucleotide with phosphorothioate linkage
  modified_base 114: mod_base = OTHER; note = 2'-O-methyl modified nucleotide
gctggtacacggcagggtcagttttagagctagaaatagcaagttaaaataaggctagtccgttatcaacttgaaaaagtggcaccgagtcggtgctatccagtgaccctgccg

SEQ ID NO: 16685 - RNA, 121 nt, synthetic construct
  source 1..121: mol_type = other RNA
  modified_base 1: mod_base = OTHER; note = 2'-O-methyl modified nucleotide with phosphorothioate linkage
  modified_base 2: mod_base = OTHER; note = 2'-O-methyl modified nucleotide with phosphorothioate linkage
  modified_base 3: mod_base = OTHER; note = 2'-O-methyl modified nucleotide with phosphorothioate linkage
  modified_base 29: mod_base = OTHER; note = 2'-O-methyl modified nucleotide
  modified_base 30: mod_base = OTHER; note = 2'-O-methyl modified nucleotide
  modified_base 31: mod_base = OTHER; note = 2'-O-methyl modified nucleotide
  modified_base 32: mod_base = OTHER; note = 2'-O-methyl modified nucleotide
  modified_base 33: mod_base = OTHER; note = 2'-O-methyl modified nucleotide
  modified_base 34: mod_base = OTHER; note = 2'-O-methyl modified nucleotide
  modified_base 35: mod_base = OTHER; note = 2'-O-methyl modified nucleotide
  modified_base 36: mod_base = OTHER; note = 2'-O-methyl modified nucleotide
  modified_base 37: mod_base = OTHER; note = 2'-O-methyl modified nucleotide
  modified_base 38: mod_base = OTHER; note = 2'-O-methyl modified nucleotide
  modified_base 39: mod_base = OTHER; note = 2'-O-methyl modified nucleotide
  modified_base 40: mod_base = OTHER; note = 2'-O-methyl modified nucleotide
  modified_base 69: mod_base = OTHER; note = 2'-O-methyl modified nucleotide
  modified_base 70: mod_base = OTHER; note = 2'-O-methyl modified nucleotide
  modified_base 71: mod_base = OTHER; note = 2'-O-methyl modified nucleotide
  modified_base 72: mod_base = OTHER; note = 2'-O-methyl modified nucleotide
  modified_base 73: mod_base = OTHER; note = 2'-O-methyl modified nucleotide
  modified_base 74: mod_base = OTHER; note = 2'-O-methyl modified nucleotide
  modified_base 75: mod_base = OTHER; note = 2'-O-methyl modified nucleotide
  modified_base 76: mod_base = OTHER; note = 2'-O-methyl modified nucleotide
  modified_base 77: mod_base = OTHER; note = 2'-O-methyl modified nucleotide
  modified_base 78: mod_base = OTHER; note = 2'-O-methyl modified nucleotide
  modified_base 79: mod_base = OTHER; note = 2'-O-methyl modified nucleotide
  modified_base 80: mod_base = OTHER; note = 2'-O-methyl modified nucleotide
  modified_base 81: mod_base = OTHER; note = 2'-O-methyl modified nucleotide
  modified_base 82: mod_base = OTHER; note = 2'-O-methyl modified nucleotide
  modified_base 83: mod_base = OTHER; note = 2'-O-methyl modified nucleotide
  modified_base 84: mod_base = OTHER; note = 2'-O-methyl modified nucleotide
  modified_base 85: mod_base = OTHER; note = 2'-O-methyl modified nucleotide
  modified_base 86: mod_base = OTHER; note = 2'-O-methyl modified nucleotide
  modified_base 87: mod_base = OTHER; note = 2'-O-methyl modified nucleotide
  modified_base 88: mod_base = OTHER; note = 2'-O-methyl modified nucleotide
  modified_base 89: mod_base = OTHER; note = 2'-O-methyl modified nucleotide
  modified_base 90: mod_base = OTHER; note = 2'-O-methyl modified nucleotide
  modified_base 91: mod_base = OTHER; note = 2'-O-methyl modified nucleotide
  modified_base 92: mod_base = OTHER; note = 2'-O-methyl modified nucleotide
  modified_base 93: mod_base = OTHER; note = 2'-O-methyl modified nucleotide
  modified_base 94: mod_base = OTHER; note = 2'-O-methyl modified nucleotide
  modified_base 95: mod_base = OTHER; note = 2'-O-methyl modified nucleotide
  modified_base 96: mod_base = OTHER; note = 2'-O-methyl modified nucleotide
  modified_base 118: mod_base = OTHER; note = Nucleotide with phosphorothioate linkage
  modified_base 119: mod_base = OTHER; note = 2'-O-methyl modified nucleotide with phosphorothioate linkage
  modified_base 120: mod_base = OTHER; note = 2'-O-methyl modified nucleotide with phosphorothioate linkage
  modified_base 121: mod_base = OTHER; note = 2'-O-methyl modified nucleotide
gctggtacacggcagggtcagttttagagctagaaatagcaagttaaaataaggctagtccgttatcaacttgaaaaagtggcaccgagtcggtgcgatatccagtgaccctgccgtgtac

SEQ ID NO: 16686 - RNA, 120 nt, synthetic construct
  source 1..120: mol_type = other RNA
  modified_base 1: mod_base = OTHER; note = 2'-O-methyl modified nucleotide with phosphorothioate linkage
  modified_base 2: mod_base = OTHER; note = 2'-O-methyl modified nucleotide with phosphorothioate linkage
  modified_base 3: mod_base = OTHER; note = 2'-O-methyl modified nucleotide with phosphorothioate linkage
  modified_base 29: mod_base = OTHER; note = 2'-O-methyl modified nucleotide
  modified_base 30: mod_base = OTHER; note = 2'-O-methyl modified nucleotide
  modified_base 31: mod_base = OTHER; note = 2'-O-methyl modified nucleotide
  modified_base 32: mod_base = OTHER; note = 2'-O-methyl modified nucleotide
  modified_base 33: mod_base = OTHER; note = 2'-O-methyl modified nucleotide
  modified_base 34: mod_base = OTHER; note = 2'-O-methyl modified nucleotide
  modified_base 35: mod_base = OTHER; note = 2'-O-methyl modified nucleotide
  modified_base 36: mod_base = OTHER; note = 2'-O-methyl modified nucleotide
  modified_base 37: mod_base = OTHER; note = 2'-O-methyl modified nucleotide
  modified_base 38: mod_base = OTHER; note = 2'-O-methyl modified nucleotide
  modified_base 39: mod_base = OTHER; note = 2'-O-methyl modified nucleotide
  modified_base 40: mod_base = OTHER; note = 2'-O-methyl modified nucleotide
  modified_base 69: mod_base = OTHER; note = 2'-O-methyl modified nucleotide
  modified_base 70: mod_base = OTHER; note = 2'-O-methyl modified nucleotide
  modified_base 71: mod_base = OTHER; note = 2'-O-methyl modified nucleotide
  modified_base 72: mod_base = OTHER; note = 2'-O-methyl modified nucleotide
  modified_base 73: mod_base = OTHER; note = 2'-O-methyl modified nucleotide
  modified_base 74: mod_base = OTHER; note = 2'-O-methyl modified nucleotide
  modified_base 75: mod_base = OTHER; note = 2'-O-methyl modified nucleotide
  modified_base 76: mod_base = OTHER; note = 2'-O-methyl modified nucleotide
  modified_base 77: mod_base = OTHER; note = 2'-O-methyl modified nucleotide
  modified_base 78: mod_base = OTHER; note = 2'-O-methyl modified nucleotide
  modified_base 79: mod_base = OTHER; note = 2'-O-methyl modified nucleotide
  modified_base 80: mod_base = OTHER; note = 2'-O-methyl modified nucleotide
  modified_base 81: mod_base = OTHER; note = 2'-O-methyl modified nucleotide
  modified_base 82: mod_base = OTHER; note = 2'-O-methyl modified nucleotide
  modified_base 83: mod_base = OTHER; note = 2'-O-methyl modified nucleotide
  modified_base 84: mod_base = OTHER; note = 2'-O-methyl modified nucleotide
  modified_base 85: mod_base = OTHER; note = 2'-O-methyl modified nucleotide
  modified_base 86: mod_base = OTHER; note = 2'-O-methyl modified nucleotide
  modified_base 87: mod_base = OTHER; note = 2'-O-methyl modified nucleotide
  modified_base 88: mod_base = OTHER; note = 2'-O-methyl modified nucleotide
  modified_base 89: mod_base = OTHER; note = 2'-O-methyl modified nucleotide
  modified_base 90: mod_base = OTHER; note = 2'-O-methyl modified nucleotide
  modified_base 91: mod_base = OTHER; note = 2'-O-methyl modified nucleotide
  modified_base 92: mod_base = OTHER; note = 2'-O-methyl modified nucleotide
  modified_base 93: mod_base = OTHER; note = 2'-O-methyl modified nucleotide
  modified_base 94: mod_base = OTHER; note = 2'-O-methyl modified nucleotide
  modified_base 95: mod_base = OTHER; note = 2'-O-methyl modified nucleotide
  modified_base 96: mod_base = OTHER; note = 2'-O-methyl modified nucleotide
  modified_base 117: mod_base = OTHER; note = Nucleotide with phosphorothioate linkage
  modified_base 118: mod_base = OTHER; note = 2'-O-methyl modified nucleotide with phosphorothioate linkage
  modified_base 119: mod_base = OTHER; note = 2'-O-methyl modified nucleotide with phosphorothioate linkage
  modified_base 120: mod_base = OTHER; note = 2'-O-methyl modified nucleotide
gctggtacacggcagggtcagttttagagctagaaatagcaagttaaaataaggctagtccgttatcaacttgaaaaagtggcaccgagtcggtgcgatatccagtgaccctgccgtgta

SEQ ID NO: 16687 - RNA, 119 nt, synthetic construct
  source 1..119: mol_type = other RNA
  modified_base 1: mod_base = OTHER; note = 2'-O-methyl modified nucleotide with phosphorothioate linkage
  modified_base 2: mod_base = OTHER; note = 2'-O-methyl modified nucleotide with phosphorothioate linkage
  modified_base 3: mod_base = OTHER; note = 2'-O-methyl modified nucleotide with phosphorothioate linkage
  modified_base 29: mod_base = OTHER; note = 2'-O-methyl modified nucleotide
  modified_base 30: mod_base = OTHER; note = 2'-O-methyl modified nucleotide
  modified_base 31: mod_base = OTHER; note = 2'-O-methyl modified nucleotide
  modified_base 32: mod_base = OTHER; note = 2'-O-methyl modified nucleotide
  modified_base 33: mod_base = OTHER; note = 2'-O-methyl modified nucleotide
  modified_base 34: mod_base = OTHER; note = 2'-O-methyl modified nucleotide
  modified_base 35: mod_base = OTHER; note = 2'-O-methyl modified nucleotide
  modified_base 36: mod_base = OTHER; note = 2'-O-methyl modified nucleotide
  modified_base 37: mod_base = OTHER; note = 2'-O-methyl modified nucleotide
  modified_base 38: mod_base = OTHER; note = 2'-O-methyl modified nucleotide
  modified_base 39: mod_base = OTHER; note = 2'-O-methyl modified nucleotide
  modified_base 40: mod_base = OTHER; note = 2'-O-methyl modified nucleotide
  modified_base 69: mod_base = OTHER; note = 2'-O-methyl modified nucleotide
  modified_base 70: mod_base = OTHER; note = 2'-O-methyl modified nucleotide
  modified_base 71: mod_base = OTHER; note = 2'-O-methyl modified nucleotide
  modified_base 72: mod_base = OTHER; note = 2'-O-methyl modified nucleotide
  modified_base 73: mod_base = OTHER; note = 2'-O-methyl modified nucleotide
  modified_base 74: mod_base = OTHER; note = 2'-O-methyl modified nucleotide
  modified_base 75: mod_base = OTHER; note = 2'-O-methyl modified nucleotide
  modified_base 76: mod_base = OTHER; note = 2'-O-methyl modified nucleotide
  modified_base 77: mod_base = OTHER; note = 2'-O-methyl modified nucleotide
  modified_base 78: mod_base = OTHER; note = 2'-O-methyl modified nucleotide
  modified_base 79: mod_base = OTHER; note = 2'-O-methyl modified nucleotide
  modified_base 80: mod_base = OTHER; note = 2'-O-methyl modified nucleotide
  modified_base 81: mod_base = OTHER; note = 2'-O-methyl modified nucleotide
  modified_base 82: mod_base = OTHER; note = 2'-O-methyl modified nucleotide
  modified_base 83: mod_base = OTHER; note = 2'-O-methyl modified nucleotide
  modified_base 84: mod_base = OTHER; note = 2'-O-methyl modified nucleotide
  modified_base 85: mod_base = OTHER; note = 2'-O-methyl modified nucleotide
  modified_base 86: mod_base = OTHER; note = 2'-O-methyl modified nucleotide
  modified_base 87: mod_base = OTHER; note = 2'-O-methyl modified nucleotide
  modified_base 88: mod_base = OTHER; note = 2'-O-methyl modified nucleotide
  modified_base 89: mod_base = OTHER; note = 2'-O-methyl modified nucleotide
  modified_base 90: mod_base = OTHER; note = 2'-O-methyl modified nucleotide
  modified_base 91: mod_base = OTHER; note = 2'-O-methyl modified nucleotide
  modified_base 92: mod_base = OTHER; note = 2'-O-methyl modified nucleotide
  modified_base 93: mod_base = OTHER; note = 2'-O-methyl modified nucleotide
  modified_base 94: mod_base = OTHER; note = 2'-O-methyl modified nucleotide
  modified_base 95: mod_base = OTHER; note = 2'-O-methyl modified nucleotide
  modified_base 96: mod_base = OTHER; note = 2'-O-methyl modified nucleotide
  modified_base 116: mod_base = OTHER; note = Nucleotide with phosphorothioate linkage
  modified_base 117: mod_base = OTHER; note = 2'-O-methyl modified nucleotide with phosphorothioate linkage
  modified_base 118: mod_base = OTHER; note = 2'-O-methyl modified nucleotide with phosphorothioate linkage
  modified_base 119: mod_base = OTHER; note = 2'-O-methyl modified nucleotide
gctggtacacggcagggtcagttttagagctagaaatagcaagttaaaataaggctagtccgttatcaacttgaaaaagtggcaccgagtcggtgcgatatccagtgaccctgccgtgt

SEQ ID NO: 16688 - RNA, 118 nt, synthetic construct
  source 1..118: mol_type = other RNA
  modified_base 1: mod_base = OTHER; note = 2'-O-methyl modified nucleotide with phosphorothioate linkage
  modified_base 2: mod_base = OTHER; note = 2'-O-methyl modified nucleotide with phosphorothioate linkage
  modified_base 3: mod_base = OTHER; note = 2'-O-methyl modified nucleotide with phosphorothioate linkage
  modified_base 29: mod_base = OTHER; note = 2'-O-methyl modified nucleotide
  modified_base 30: mod_base = OTHER; note = 2'-O-methyl modified nucleotide
  modified_base 31: mod_base = OTHER; note = 2'-O-methyl modified nucleotide
  modified_base 32: mod_base = OTHER; note = 2'-O-methyl modified nucleotide
  modified_base 33: mod_base = OTHER; note = 2'-O-methyl modified nucleotide
  modified_base 34: mod_base = OTHER; note = 2'-O-methyl modified nucleotide
  modified_base 35: mod_base = OTHER; note = 2'-O-methyl modified nucleotide
  modified_base 36: mod_base = OTHER; note = 2'-O-methyl modified nucleotide
  modified_base 37: mod_base = OTHER; note = 2'-O-methyl modified nucleotide
  modified_base 38: mod_base = OTHER; note = 2'-O-methyl modified nucleotide
  modified_base 39: mod_base = OTHER; note = 2'-O-methyl modified nucleotide
  modified_base 40: mod_base = OTHER; note = 2'-O-methyl modified nucleotide
  modified_base 69: mod_base = OTHER; note = 2'-O-methyl modified nucleotide
  modified_base 70: mod_base = OTHER; note = 2'-O-methyl modified nucleotide
  modified_base 71: mod_base = OTHER; note = 2'-O-methyl modified nucleotide
  modified_base 72: mod_base = OTHER; note = 2'-O-methyl modified nucleotide
  modified_base 73: mod_base = OTHER; note = 2'-O-methyl modified nucleotide
  modified_base 74: mod_base = OTHER; note = 2'-O-methyl modified nucleotide
  modified_base 75: mod_base = OTHER; note = 2'-O-methyl modified nucleotide
  modified_base 76: mod_base = OTHER; note = 2'-O-methyl modified nucleotide
  modified_base 77: mod_base = OTHER; note = 2'-O-methyl modified nucleotide
  modified_base 78: mod_base = OTHER; note = 2'-O-methyl modified nucleotide
  modified_base 79: mod_base = OTHER; note = 2'-O-methyl modified nucleotide
  modified_base 80: mod_base = OTHER; note = 2'-O-methyl modified nucleotide
  modified_base 81: mod_base = OTHER; note = 2'-O-methyl modified nucleotide
  modified_base 82: mod_base = OTHER; note = 2'-O-methyl modified nucleotide
  modified_base 83: mod_base = OTHER; note = 2'-O-methyl modified nucleotide
  modified_base 84: mod_base = OTHER; note = 2'-O-methyl modified nucleotide
  modified_base 85: mod_base = OTHER; note = 2'-O-methyl modified nucleotide
  modified_base 86: mod_base = OTHER; note = 2'-O-methyl modified nucleotide
  modified_base 87: mod_base = OTHER; note = 2'-O-methyl modified nucleotide
  modified_base 88: mod_base = OTHER; note = 2'-O-methyl modified nucleotide
  modified_base 89: mod_base = OTHER; note = 2'-O-methyl modified nucleotide
  modified_base 90: mod_base = OTHER; note = 2'-O-methyl modified nucleotide
  modified_base 91: mod_base = OTHER; note = 2'-O-methyl modified nucleotide
  modified_base 92: mod_base = OTHER; note = 2'-O-methyl modified nucleotide
  modified_base 93: mod_base = OTHER; note = 2'-O-methyl modified nucleotide
  modified_base 94: mod_base = OTHER; note = 2'-O-methyl modified nucleotide
  modified_base 95: mod_base = OTHER; note = 2'-O-methyl modified nucleotide
  modified_base 96: mod_base = OTHER; note = 2'-O-methyl modified nucleotide
  modified_base 115: mod_base = OTHER; note = Nucleotide with phosphorothioate linkage
  modified_base 116: mod_base = OTHER; note = 2'-O-methyl modified nucleotide with phosphorothioate linkage
  modified_base 117: mod_base = OTHER; note = 2'-O-methyl modified nucleotide with phosphorothioate linkage
  modified_base 118: mod_base = OTHER; note = 2'-O-methyl modified nucleotide
gctggtacacggcagggtcagttttagagctagaaatagcaagttaaaataaggctagtccgttatcaacttgaaaaagtggcaccgagtcggtgcgatatccagtgaccctgccgtg

SEQ ID NO: 16689 - RNA, 117 nt, synthetic construct
  source 1..117: mol_type = other RNA
  modified_base 1: mod_base = OTHER; note = 2'-O-methyl modified nucleotide with phosphorothioate linkage
  modified_base 2: mod_base = OTHER; note = 2'-O-methyl modified nucleotide with phosphorothioate linkage
  modified_base 3: mod_base = OTHER; note = 2'-O-methyl modified nucleotide with phosphorothioate linkage
  modified_base 29: mod_base = OTHER; note = 2'-O-methyl modified nucleotide
  modified_base 30: mod_base = OTHER; note = 2'-O-methyl modified nucleotide
  modified_base 31: mod_base = OTHER; note = 2'-O-methyl modified nucleotide
  modified_base 32: mod_base = OTHER; note = 2'-O-methyl modified nucleotide
  modified_base 33: mod_base = OTHER; note = 2'-O-methyl modified nucleotide
  modified_base 34: mod_base = OTHER; note = 2'-O-methyl modified nucleotide
  modified_base 35: mod_base = OTHER; note = 2'-O-methyl modified nucleotide
  modified_base 36: mod_base = OTHER; note = 2'-O-methyl modified nucleotide
  modified_base 37: mod_base = OTHER; note = 2'-O-methyl modified nucleotide
  modified_base 38: mod_base = OTHER; note = 2'-O-methyl modified nucleotide
  modified_base 39: mod_base = OTHER; note = 2'-O-methyl modified nucleotide
  modified_base 40: mod_base = OTHER; note = 2'-O-methyl modified nucleotide
  modified_base 69: mod_base = OTHER; note = 2'-O-methyl modified nucleotide
  modified_base 70: mod_base = OTHER; note = 2'-O-methyl modified nucleotide
  modified_base 71: mod_base = OTHER; note = 2'-O-methyl modified nucleotide
  modified_base 72: mod_base = OTHER; note = 2'-O-methyl modified nucleotide
  modified_base 73: mod_base = OTHER; note = 2'-O-methyl modified nucleotide
  modified_base 74: mod_base = OTHER; note = 2'-O-methyl modified nucleotide
  modified_base 75: mod_base = OTHER; note = 2'-O-methyl modified nucleotide
  modified_base 76: mod_base = OTHER; note = 2'-O-methyl modified nucleotide
  modified_base 77: mod_base = OTHER; note = 2'-O-methyl modified nucleotide
  modified_base 78: mod_base = OTHER; note = 2'-O-methyl modified nucleotide
  modified_base 79: mod_base = OTHER; note = 2'-O-methyl modified nucleotide
  modified_base 80: mod_base = OTHER; note = 2'-O-methyl modified nucleotide
  modified_base 81: mod_base = OTHER; note = 2'-O-methyl modified nucleotide
  modified_base 82: mod_base = OTHER; note = 2'-O-methyl modified nucleotide
  modified_base 83: mod_base = OTHER; note = 2'-O-methyl modified nucleotide
  modified_base 84: mod_base = OTHER; note = 2'-O-methyl modified nucleotide
  modified_base 85: mod_base = OTHER; note = 2'-O-methyl modified nucleotide
  modified_base 86: mod_base = OTHER; note = 2'-O-methyl modified nucleotide
  modified_base 87: mod_base = OTHER; note = 2'-O-methyl modified nucleotide
  modified_base 88: mod_base = OTHER; note = 2'-O-methyl modified nucleotide
  modified_base 89: mod_base = OTHER; note = 2'-O-methyl modified nucleotide
  modified_base 90: mod_base = OTHER; note = 2'-O-methyl modified nucleotide
  modified_base 91: mod_base = OTHER; note = 2'-O-methyl modified nucleotide
  modified_base 92: mod_base = OTHER; note = 2'-O-methyl modified nucleotide
  modified_base 93: mod_base = OTHER; note = 2'-O-methyl modified nucleotide
  modified_base 94: mod_base = OTHER; note = 2'-O-methyl modified nucleotide
  modified_base 95: mod_base = OTHER; note = 2'-O-methyl modified nucleotide
  modified_base 96: mod_base = OTHER; note = 2'-O-methyl modified nucleotide
  modified_base 114: mod_base = OTHER; note = Nucleotide with phosphorothioate linkage
  modified_base 115: mod_base = OTHER; note = 2'-O-methyl modified nucleotide with phosphorothioate linkage
  modified_base 116: mod_base = OTHER; note = 2'-O-methyl modified nucleotide with phosphorothioate linkage
  modified_base 117: mod_base = OTHER; note = 2'-O-methyl modified nucleotide
gctggtacacggcagggtcagttttagagctagaaatagcaagttaaaataaggctagtccgttatcaacttgaaaaagtggcaccgagtcggtgcgatatccagtgaccctgccgt

SEQ ID NO: 16690 - RNA, 116 nt, synthetic construct
  source 1..116: mol_type = other RNA
  modified_base 1: mod_base = OTHER; note = 2'-O-methyl modified nucleotide with phosphorothioate linkage
  modified_base 2: mod_base = OTHER; note = 2'-O-methyl modified nucleotide with phosphorothioate linkage
  modified_base 3: mod_base = OTHER; note = 2'-O-methyl modified nucleotide with phosphorothioate linkage
  modified_base 29: mod_base = OTHER; note = 2'-O-methyl modified nucleotide
  modified_base 30: mod_base = OTHER; note = 2'-O-methyl modified nucleotide
  modified_base 31: mod_base = OTHER; note = 2'-O-methyl modified nucleotide
  modified_base 32: mod_base = OTHER; note = 2'-O-methyl modified nucleotide
  modified_base 33: mod_base = OTHER; note = 2'-O-methyl modified nucleotide
  modified_base 34: mod_base = OTHER; note = 2'-O-methyl modified nucleotide
  modified_base 35: mod_base = OTHER; note = 2'-O-methyl modified nucleotide
  modified_base 36: mod_base = OTHER; note = 2'-O-methyl modified nucleotide
  modified_base 37: mod_base = OTHER; note = 2'-O-methyl modified nucleotide
  modified_base 38: mod_base = OTHER; note = 2'-O-methyl modified nucleotide
  modified_base 39: mod_base = OTHER; note = 2'-O-methyl modified nucleotide
  modified_base 40: mod_base = OTHER; note = 2'-O-methyl modified nucleotide
  modified_base 69: mod_base = OTHER; note = 2'-O-methyl modified nucleotide
  modified_base 70: mod_base = OTHER; note = 2'-O-methyl modified nucleotide
  modified_base 71: mod_base = OTHER; note = 2'-O-methyl modified nucleotide
  modified_base 72: mod_base = OTHER; note = 2'-O-methyl modified nucleotide
  modified_base 73: mod_base = OTHER; note = 2'-O-methyl modified nucleotide
  modified_base 74: mod_base = OTHER; note = 2'-O-methyl modified nucleotide
  modified_base 75: mod_base = OTHER; note = 2'-O-methyl modified nucleotide
  modified_base 76: mod_base = OTHER; note = 2'-O-methyl modified nucleotide
  modified_base 77: mod_base = OTHER; note = 2'-O-methyl modified nucleotide
  modified_base 78: mod_base = OTHER; note = 2'-O-methyl modified nucleotide
  modified_base 79: mod_base = OTHER; note = 2'-O-methyl modified nucleotide
  modified_base 80: mod_base = OTHER; note = 2'-O-methyl modified nucleotide
  modified_base 81: mod_base = OTHER; note = 2'-O-methyl modified nucleotide
  modified_base 82: mod_base = OTHER; note = 2'-O-methyl modified nucleotide
  modified_base 83: mod_base = OTHER; note = 2'-O-methyl modified nucleotide
  modified_base 84: mod_base = OTHER; note = 2'-O-methyl modified nucleotide
  modified_base 85: mod_base = OTHER; note = 2'-O-methyl modified nucleotide
  modified_base 86: mod_base = OTHER; note = 2'-O-methyl modified nucleotide
  modified_base 87: mod_base = OTHER; note = 2'-O-methyl modified nucleotide
  modified_base 88: mod_base = OTHER; note = 2'-O-methyl modified nucleotide
  modified_base 89: mod_base = OTHER; note = 2'-O-methyl modified nucleotide
  modified_base 90: mod_base = OTHER; note = 2'-O-methyl modified nucleotide
  modified_base 91: mod_base = OTHER; note = 2'-O-methyl modified nucleotide
  modified_base 92: mod_base = OTHER; note = 2'-O-methyl modified nucleotide
  modified_base 93: mod_base = OTHER; note = 2'-O-methyl modified nucleotide
  modified_base 94: mod_base = OTHER; note = 2'-O-methyl modified nucleotide
  modified_base 95: mod_base = OTHER; note = 2'-O-methyl modified nucleotide
  modified_base 96: mod_base = OTHER; note = 2'-O-methyl modified nucleotide
  modified_base 113: mod_base = OTHER; note = Nucleotide with phosphorothioate linkage
  modified_base 114: mod_base = OTHER; note = 2'-O-methyl modified nucleotide with phosphorothioate linkage
  modified_base 115: mod_base = OTHER; note = 2'-O-methyl modified nucleotide with phosphorothioate linkage
  modified_base 116: mod_base = OTHER; note = 2'-O-methyl modified nucleotide
gctggtacacggcagggtcagttttagagctagaaatagcaagttaaaataaggctagtccgttatcaacttgaaaaagtggcaccgagtcggtgcgatatccagtgaccctgccg

SEQ ID NO: 16691 - RNA, 123 nt, synthetic construct
  source 1..123: mol_type = other RNA
  modified_base 1: mod_base = OTHER; note = 2'-O-methyl modified nucleotide with phosphorothioate linkage
  modified_base 2: mod_base = OTHER; note = 2'-O-methyl modified nucleotide with phosphorothioate linkage
  modified_base 3: mod_base = OTHER; note = 2'-O-methyl modified nucleotide with phosphorothioate linkage
  modified_base 29: mod_base = OTHER; note = 2'-O-methyl modified nucleotide
  modified_base 30: mod_base = OTHER; note = 2'-O-methyl modified nucleotide
  modified_base 31: mod_base = OTHER; note = 2'-O-methyl modified nucleotide
  modified_base 32: mod_base = OTHER; note = 2'-O-methyl modified nucleotide
  modified_base 33: mod_base = OTHER; note = 2'-O-methyl modified nucleotide
  modified_base 34: mod_base = OTHER; note = 2'-O-methyl modified nucleotide
  modified_base 35: mod_base = OTHER; note = 2'-O-methyl modified nucleotide
  modified_base 36: mod_base = OTHER; note = 2'-O-methyl modified nucleotide
  modified_base 37: mod_base = OTHER; note = 2'-O-methyl modified nucleotide
  modified_base 38: mod_base = OTHER; note = 2'-O-methyl modified nucleotide
  modified_base 39: mod_base = OTHER; note = 2'-O-methyl modified nucleotide
  modified_base 40: mod_base = OTHER; note = 2'-O-methyl modified nucleotide
  modified_base 69: mod_base = OTHER; note = 2'-O-methyl modified nucleotide
  modified_base 70: mod_base = OTHER; note = 2'-O-methyl modified nucleotide
  modified_base 71: mod_base = OTHER; note = 2'-O-methyl modified nucleotide
  modified_base 72: mod_base = OTHER; note = 2'-O-methyl modified nucleotide
  modified_base 73: mod_base = OTHER; note = 2'-O-methyl modified nucleotide
  modified_base 74: mod_base = OTHER; note = 2'-O-methyl modified nucleotide
  modified_base 75: mod_base = OTHER; note = 2'-O-methyl modified nucleotide
  modified_base 76: mod_base = OTHER; note = 2'-O-methyl modified nucleotide
  modified_base 77: mod_base = OTHER; note = 2'-O-methyl modified nucleotide
  modified_base 78: mod_base = OTHER; note = 2'-O-methyl modified nucleotide
  modified_base 79: mod_base = OTHER; note = 2'-O-methyl modified nucleotide
  modified_base 80: mod_base = OTHER; note = 2'-O-methyl modified nucleotide
  modified_base 81: mod_base = OTHER; note = 2'-O-methyl modified nucleotide
  modified_base 82: mod_base = OTHER; note = 2'-O-methyl modified nucleotide
  modified_base 83: mod_base = OTHER; note = 2'-O-methyl modified nucleotide
  modified_base 84: mod_base = OTHER; note = 2'-O-methyl modified nucleotide
  modified_base 85: mod_base = OTHER; note = 2'-O-methyl modified nucleotide
  modified_base 86: mod_base = OTHER; note = 2'-O-methyl modified nucleotide
  modified_base 87: mod_base = OTHER; note = 2'-O-methyl modified nucleotide
  modified_base 88: mod_base = OTHER; note = 2'-O-methyl modified nucleotide
  modified_base 89: mod_base = OTHER; note = 2'-O-methyl modified nucleotide
  modified_base 90: mod_base = OTHER; note = 2'-O-methyl modified nucleotide
  modified_base 91: mod_base = OTHER; note = 2'-O-methyl modified nucleotide
  modified_base 92: mod_base = OTHER; note = 2'-O-methyl modified nucleotide
  modified_base 93: mod_base = OTHER; note = 2'-O-methyl modified nucleotide
  modified_base 94: mod_base = OTHER; note = 2'-O-methyl modified nucleotide
  modified_base 95: mod_base = OTHER; note = 2'-O-methyl modified nucleotide
  modified_base 96: mod_base = OTHER; note = 2'-O-methyl modified nucleotide
  modified_base 120: mod_base = OTHER; note = Nucleotide with phosphorothioate linkage
  modified_base 121: mod_base = OTHER; note = 2'-O-methyl modified nucleotide with phosphorothioate linkage
  modified_base 122: mod_base = OTHER; note = 2'-O-methyl modified nucleotide with phosphorothioate linkage
  modified_base 123: mod_base = OTHER; note = 2'-O-methyl modified nucleotide
gctggtacacggcagggtcagttttagagctagaaatagcaagttaaaataaggctagtccgttatcaacttgaaaaagtggcaccgagtcggtgccagatatccagtgaccctgccgtgtac

SEQ ID NO: 16692 - RNA, 122 nt, synthetic construct
  source 1..122: mol_type = other RNA
  modified_base 1: mod_base = OTHER; note = 2'-O-methyl modified nucleotide with phosphorothioate linkage
  modified_base 2: mod_base = OTHER; note = 2'-O-methyl modified nucleotide with phosphorothioate linkage
  modified_base 3: mod_base = OTHER; note = 2'-O-methyl modified nucleotide with phosphorothioate linkage
  modified_base 29: mod_base = OTHER; note = 2'-O-methyl modified nucleotide
  modified_base 30: mod_base = OTHER; note = 2'-O-methyl modified nucleotide
  modified_base 31: mod_base = OTHER; note = 2'-O-methyl modified nucleotide
  modified_base 32: mod_base = OTHER; note = 2'-O-methyl modified nucleotide
  modified_base 33: mod_base = OTHER; note = 2'-O-methyl modified nucleotide
  modified_base 34: mod_base = OTHER; note = 2'-O-methyl modified nucleotide
  modified_base 35: mod_base = OTHER; note = 2'-O-methyl modified nucleotide
  modified_base 36: mod_base = OTHER; note = 2'-O-methyl modified nucleotide
  modified_base 37: mod_base = OTHER; note = 2'-O-methyl modified nucleotide
  modified_base 38: mod_base = OTHER; note = 2'-O-methyl modified nucleotide
  modified_base 39: mod_base = OTHER; note = 2'-O-methyl modified nucleotide
  modified_base 40: mod_base = OTHER; note = 2'-O-methyl modified nucleotide
  modified_base 69: mod_base = OTHER; note = 2'-O-methyl modified nucleotide
  modified_base 70: mod_base = OTHER; note = 2'-O-methyl modified nucleotide
  modified_base 71: mod_base = OTHER; note = 2'-O-methyl modified nucleotide
  modified_base 72: mod_base = OTHER; note = 2'-O-methyl modified nucleotide
  modified_base 73: mod_base = OTHER; note = 2'-O-methyl modified nucleotide
  modified_base 74: mod_base = OTHER; note = 2'-O-methyl modified nucleotide
  modified_base 75: mod_base = OTHER; note = 2'-O-methyl modified nucleotide
  modified_base 76: mod_base = OTHER; note = 2'-O-methyl modified nucleotide
  modified_base 77: mod_base = OTHER; note = 2'-O-methyl modified nucleotide
  modified_base 78: mod_base = OTHER; note = 2'-O-methyl modified nucleotide
  modified_base 79: mod_base = OTHER; note = 2'-O-methyl modified nucleotide
  modified_base 80: mod_base = OTHER; note = 2'-O-methyl modified nucleotide
  modified_base 81: mod_base = OTHER; note = 2'-O-methyl modified nucleotide
  modified_base 82: mod_base = OTHER; note = 2'-O-methyl modified nucleotide
  modified_base 83: mod_base = OTHER; note = 2'-O-methyl modified nucleotide
  modified_base 84: mod_base = OTHER; note = 2'-O-methyl modified nucleotide
  modified_base 85: mod_base = OTHER; note = 2'-O-methyl modified nucleotide
  modified_base 86: mod_base = OTHER; note = 2'-O-methyl modified nucleotide
  modified_base 87: mod_base = OTHER; note = 2'-O-methyl modified nucleotide
  modified_base 88: mod_base = OTHER; note = 2'-O-methyl modified nucleotide
  modified_base 89: mod_base = OTHER; note = 2'-O-methyl modified nucleotide
  modified_base 90: mod_base = OTHER; note = 2'-O-methyl modified nucleotide
  modified_base 91: mod_base = OTHER; note = 2'-O-methyl modified nucleotide
  modified_base 92: mod_base = OTHER; note = 2'-O-methyl modified nucleotide
  modified_base 93: mod_base = OTHER; note = 2'-O-methyl modified nucleotide
  modified_base 94: mod_base = OTHER; note = 2'-O-methyl modified nucleotide
  modified_base 95: mod_base = OTHER; note = 2'-O-methyl modified nucleotide
  modified_base 96: mod_base = OTHER; note = 2'-O-methyl modified nucleotide
  modified_base 119: mod_base = OTHER; note = Nucleotide with phosphorothioate linkage
  modified_base 120: mod_base = OTHER; note = 2'-O-methyl modified nucleotide with phosphorothioate linkage
  modified_base 121: mod_base = OTHER; note = 2'-O-methyl modified nucleotide with phosphorothioate linkage
  modified_base 122: mod_base = OTHER; note = 2'-O-methyl modified nucleotide
gctggtacacggcagggtcagttttagagctagaaatagcaagttaaaataaggctagtccgttatcaacttgaaaaagtggcaccgagtcggtgccagatatccagtgaccctgccgtgta

SEQ ID NO: 16693 - RNA, 121 nt, synthetic construct
  source 1..121: mol_type = other RNA
  modified_base 1: mod_base = OTHER; note = 2'-O-methyl modified nucleotide with phosphorothioate linkage
  modified_base 2: mod_base = OTHER; note = 2'-O-methyl modified nucleotide with phosphorothioate linkage
  modified_base 3: mod_base = OTHER; note = 2'-O-methyl modified nucleotide with phosphorothioate linkage
  modified_base 29: mod_base = OTHER; note = 2'-O-methyl modified nucleotide
  modified_base 30: mod_base = OTHER; note = 2'-O-methyl modified nucleotide
  modified_base 31: mod_base = OTHER; note = 2'-O-methyl modified nucleotide
  modified_base 32: mod_base = OTHER; note = 2'-O-methyl modified nucleotide
  modified_base 33: mod_base = OTHER; note = 2'-O-methyl modified nucleotide
  modified_base 34: mod_base = OTHER; note = 2'-O-methyl modified nucleotide
  modified_base 35: mod_base = OTHER; note = 2'-O-methyl modified nucleotide
  modified_base 36: mod_base = OTHER; note = 2'-O-methyl modified nucleotide
  modified_base 37: mod_base = OTHER; note = 2'-O-methyl modified nucleotide
  modified_base 38: mod_base = OTHER; note = 2'-O-methyl modified nucleotide
  modified_base 39: mod_base = OTHER; note = 2'-O-methyl modified nucleotide
  modified_base 40: mod_base = OTHER; note = 2'-O-methyl modified nucleotide
  modified_base 69: mod_base = OTHER; note = 2'-O-methyl modified nucleotide
  modified_base 70: mod_base = OTHER; note = 2'-O-methyl modified nucleotide
  modified_base 71: mod_base = OTHER; note = 2'-O-methyl modified nucleotide
  modified_base 72: mod_base = OTHER; note = 2'-O-methyl modified nucleotide
  modified_base 73: mod_base = OTHER; note = 2'-O-methyl modified nucleotide
  modified_base 74: mod_base = OTHER; note = 2'-O-methyl modified nucleotide
  modified_base 75: mod_base = OTHER; note = 2'-O-methyl modified nucleotide
  modified_base 76: mod_base = OTHER; note = 2'-O-methyl modified nucleotide
  modified_base 77: mod_base = OTHER; note = 2'-O-methyl modified nucleotide
  modified_base 78: mod_base = OTHER; note = 2'-O-methyl modified nucleotide
  modified_base 79: mod_base = OTHER; note = 2'-O-methyl modified nucleotide
  modified_base 80: mod_base = OTHER; note = 2'-O-methyl modified nucleotide
  modified_base 81: mod_base = OTHER; note = 2'-O-methyl modified nucleotide
  modified_base 82: mod_base = OTHER; note = 2'-O-methyl modified nucleotide
  modified_base 83: mod_base = OTHER; note = 2'-O-methyl modified nucleotide
  modified_base 84: mod_base = OTHER; note = 2'-O-methyl modified nucleotide
  modified_base 85: mod_base = OTHER; note = 2'-O-methyl modified nucleotide
  modified_base 86: mod_base = OTHER; note = 2'-O-methyl modified nucleotide
  modified_base 87: mod_base = OTHER; note = 2'-O-methyl modified nucleotide
  modified_base 88: mod_base = OTHER; note = 2'-O-methyl modified nucleotide
  modified_base 89: mod_base = OTHER; note = 2'-O-methyl modified nucleotide
  modified_base 90: mod_base = OTHER; note = 2'-O-methyl modified nucleotide
  modified_base 91: mod_base = OTHER; note = 2'-O-methyl modified nucleotide
  modified_base 92: mod_base = OTHER; note = 2'-O-methyl modified nucleotide
  modified_base 93: mod_base = OTHER; note = 2'-O-methyl modified nucleotide
  modified_base 94: mod_base = OTHER; note = 2'-O-methyl modified nucleotide
  modified_base 95: mod_base = OTHER; note = 2'-O-methyl modified nucleotide
  modified_base 96: mod_base = OTHER; note = 2'-O-methyl modified nucleotide
  modified_base 118: mod_base = OTHER; note = Nucleotide with phosphorothioate linkage
  modified_base 119: mod_base = OTHER; note = 2'-O-methyl modified nucleotide with phosphorothioate linkage
  modified_base 120: mod_base = OTHER; note = 2'-O-methyl modified nucleotide with phosphorothioate linkage
  modified_base 121: mod_base = OTHER; note = 2'-O-methyl modified nucleotide
gctggtacacggcagggtcagttttagagctagaaatagcaagttaaaataaggctagtccgttatcaacttgaaaaagtggcaccgagtcggtgccagatatccagtgaccctgccgtgt

SEQ ID NO: 16694 - RNA, 120 nt, synthetic construct
  source 1..120: mol_type = other RNA
  modified_base 1: mod_base = OTHER; note = 2'-O-methyl modified nucleotide with phosphorothioate linkage
  modified_base 2: mod_base = OTHER; note = 2'-O-methyl modified nucleotide with phosphorothioate linkage
  modified_base 3: mod_base = OTHER; note = 2'-O-methyl modified nucleotide with phosphorothioate linkage
  modified_base 29: mod_base = OTHER; note = 2'-O-methyl modified nucleotide
  modified_base 30: mod_base = OTHER; note = 2'-O-methyl modified nucleotide
  modified_base 31: mod_base = OTHER; note = 2'-O-methyl modified nucleotide
  modified_base 32: mod_base = OTHER; note = 2'-O-methyl modified nucleotide
  modified_base 33: mod_base = OTHER; note = 2'-O-methyl modified nucleotide
  modified_base 34: mod_base = OTHER; note = 2'-O-methyl modified nucleotide
  modified_base 35: mod_base = OTHER; note = 2'-O-methyl modified nucleotide
  modified_base 36: mod_base = OTHER; note = 2'-O-methyl modified nucleotide
  modified_base 37: mod_base = OTHER; note = 2'-O-methyl modified nucleotide
  modified_base 38: mod_base = OTHER; note = 2'-O-methyl modified nucleotide
  modified_base 39: mod_base = OTHER; note = 2'-O-methyl modified nucleotide
  modified_base 40: mod_base = OTHER; note = 2'-O-methyl modified nucleotide
  modified_base 69: mod_base = OTHER; note = 2'-O-methyl modified nucleotide
  modified_base 70: mod_base = OTHER; note = 2'-O-methyl modified nucleotide
  modified_base 71: mod_base = OTHER; note = 2'-O-methyl modified nucleotide
  modified_base 72: mod_base = OTHER; note = 2'-O-methyl modified nucleotide
  modified_base 73: mod_base = OTHER; note = 2'-O-methyl modified nucleotide
  modified_base 74: mod_base = OTHER; note = 2'-O-methyl modified nucleotide
  modified_base 75: mod_base = OTHER; note = 2'-O-methyl modified nucleotide
  modified_base 76: mod_base = OTHER; note = 2'-O-methyl modified nucleotide
  modified_base 77: mod_base = OTHER; note = 2'-O-methyl modified nucleotide
  modified_base 78: mod_base = OTHER; note = 2'-O-methyl modified nucleotide
  modified_base 79: mod_base = OTHER; note = 2'-O-methyl modified nucleotide
  modified_base 80: mod_base = OTHER; note = 2'-O-methyl modified nucleotide
  modified_base 81: mod_base = OTHER; note = 2'-O-methyl modified nucleotide
  modified_base 82: mod_base = OTHER; note = 2'-O-methyl modified nucleotide
  modified_base 83: mod_base = OTHER; note = 2'-O-methyl modified nucleotide
  modified_base 84: mod_base = OTHER; note = 2'-O-methyl modified nucleotide
  modified_base 85: mod_base = OTHER; note = 2'-O-methyl modified nucleotide
  modified_base 86: mod_base = OTHER; note = 2'-O-methyl modified nucleotide
  modified_base 87: mod_base = OTHER; note = 2'-O-methyl modified nucleotide
  modified_base 88: mod_base = OTHER; note = 2'-O-methyl modified nucleotide
  modified_base 89: mod_base = OTHER; note = 2'-O-methyl modified nucleotide
  modified_base 90: mod_base = OTHER; note = 2'-O-methyl modified nucleotide
  modified_base 91: mod_base = OTHER; note = 2'-O-methyl modified nucleotide
  modified_base 92: mod_base = OTHER; note = 2'-O-methyl modified nucleotide
  modified_base 93: mod_base = OTHER; note = 2'-O-methyl modified nucleotide
  modified_base 94: mod_base = OTHER; note = 2'-O-methyl modified nucleotide
  modified_base 95: mod_base = OTHER; note = 2'-O-methyl modified nucleotide
  modified_base 96: mod_base = OTHER; note = 2'-O-methyl modified nucleotide
  modified_base 117: mod_base = OTHER; note = Nucleotide with phosphorothioate linkage
  modified_base 118: mod_base = OTHER; note = 2'-O-methyl modified nucleotide with phosphorothioate linkage
  modified_base 119: mod_base = OTHER; note = 2'-O-methyl modified nucleotide with phosphorothioate linkage
  modified_base 120: mod_base = OTHER; note = 2'-O-methyl modified nucleotide
gctggtacacggcagggtcagttttagagctagaaatagcaagttaaaataaggctagtccgttatcaacttgaaaaagtggcaccgagtcggtgccagatatccagtgaccctgccgtg

SEQ ID NO: 16695 - RNA, 119 nt, synthetic construct
  source 1..119: mol_type = other RNA
  modified_base 1: mod_base = OTHER; note = 2'-O-methyl modified nucleotide with phosphorothioate linkage
  modified_base 2: mod_base = OTHER; note = 2'-O-methyl modified nucleotide with phosphorothioate linkage
  modified_base 3: mod_base = OTHER; note = 2'-O-methyl modified nucleotide with phosphorothioate linkage
  modified_base 29: mod_base = OTHER; note = 2'-O-methyl modified nucleotide
  modified_base 30: mod_base = OTHER; note = 2'-O-methyl modified nucleotide
  modified_base 31: mod_base = OTHER; note = 2'-O-methyl modified nucleotide
  modified_base 32: mod_base = OTHER; note = 2'-O-methyl modified nucleotide
  modified_base 33: mod_base = OTHER; note = 2'-O-methyl modified nucleotide
  modified_base 34: mod_base = OTHER; note = 2'-O-methyl modified nucleotide
  modified_base 35: mod_base = OTHER; note = 2'-O-methyl modified nucleotide
  modified_base 36: mod_base = OTHER; note = 2'-O-methyl modified nucleotide
  modified_base 37: mod_base = OTHER; note = 2'-O-methyl modified nucleotide
  modified_base 38: mod_base = OTHER; note = 2'-O-methyl modified nucleotide
  modified_base 39: mod_base = OTHER; note = 2'-O-methyl modified nucleotide
  modified_base 40: mod_base = OTHER; note = 2'-O-methyl modified nucleotide
  modified_base 69: mod_base = OTHER; note = 2'-O-methyl modified nucleotide
  modified_base 70: mod_base = OTHER; note = 2'-O-methyl modified nucleotide
  modified_base 71: mod_base = OTHER; note = 2'-O-methyl modified nucleotide
  modified_base 72: mod_base = OTHER; note = 2'-O-methyl modified nucleotide
  modified_base 73: mod_base = OTHER; note = 2'-O-methyl modified nucleotide
  modified_base 74: mod_base = OTHER; note = 2'-O-methyl modified nucleotide
  modified_base 75: mod_base = OTHER; note = 2'-O-methyl modified nucleotide
  modified_base 76: mod_base = OTHER; note = 2'-O-methyl modified nucleotide
  modified_base 77: mod_base = OTHER; note = 2'-O-methyl modified nucleotide
  modified_base 78: mod_base = OTHER; note = 2'-O-methyl modified nucleotide
  modified_base 79: mod_base = OTHER; note = 2'-O-methyl modified nucleotide
  modified_base 80: mod_base = OTHER; note = 2'-O-methyl modified nucleotide
  modified_base 81: mod_base = OTHER; note = 2'-O-methyl modified nucleotide
  modified_base 82: mod_base = OTHER; note = 2'-O-methyl modified nucleotide
  modified_base 83: mod_base = OTHER; note = 2'-O-methyl modified nucleotide
  modified_base 84: mod_base = OTHER; note = 2'-O-methyl modified nucleotide
  modified_base 85: mod_base = OTHER; note = 2'-O-methyl modified nucleotide
  modified_base 86: mod_base = OTHER; note = 2'-O-methyl modified nucleotide
  modified_base 87: mod_base = OTHER; note = 2'-O-methyl modified nucleotide
  modified_base 88: mod_base = OTHER; note = 2'-O-methyl modified nucleotide
  modified_base 89: mod_base = OTHER; note = 2'-O-methyl modified nucleotide
  modified_base 90: mod_base = OTHER; note = 2'-O-methyl modified nucleotide
  modified_base 91: mod_base = OTHER; note = 2'-O-methyl modified nucleotide
  modified_base 92: mod_base = OTHER; note = 2'-O-methyl modified nucleotide
  modified_base 93: mod_base = OTHER; note = 2'-O-methyl modified nucleotide
  modified_base 94: mod_base = OTHER; note = 2'-O-methyl modified nucleotide
  modified_base 95: mod_base = OTHER; note = 2'-O-methyl modified nucleotide
  modified_base 96: mod_base = OTHER; note = 2'-O-methyl modified nucleotide
  modified_base 116: mod_base = OTHER; note = Nucleotide with phosphorothioate linkage
  modified_base 117: mod_base = OTHER; note = 2'-O-methyl modified nucleotide with phosphorothioate linkage
  modified_base 118: mod_base = OTHER; note = 2'-O-methyl modified nucleotide with phosphorothioate linkage
  modified_base 119: mod_base = OTHER; note = 2'-O-methyl modified nucleotide
gctggtacacggcagggtcagttttagagctagaaatagcaagttaaaataaggctagtccgttatcaacttgaaaaagtggcaccgagtcggtgccagatatccagtgaccctgccgt

SEQ ID NO: 16696 - RNA, 118 nt, synthetic construct
  source 1..118: mol_type = other RNA
  modified_base 1: mod_base = OTHER; note = 2'-O-methyl modified nucleotide with phosphorothioate linkage
  modified_base 2: mod_base = OTHER; note = 2'-O-methyl modified nucleotide with phosphorothioate linkage
  modified_base 3: mod_base = OTHER; note = 2'-O-methyl modified nucleotide with phosphorothioate linkage
  modified_base 29: mod_base = OTHER; note = 2'-O-methyl modified nucleotide
  modified_base 30: mod_base = OTHER; note = 2'-O-methyl modified nucleotide
  modified_base 31: mod_base = OTHER; note = 2'-O-methyl modified nucleotide
  modified_base 32: mod_base = OTHER; note = 2'-O-methyl modified nucleotide
  modified_base 33: mod_base = OTHER; note = 2'-O-methyl modified nucleotide
  modified_base 34: mod_base = OTHER; note = 2'-O-methyl modified nucleotide
  modified_base 35: mod_base = OTHER; note = 2'-O-methyl modified nucleotide
  modified_base 36: mod_base = OTHER; note = 2'-O-methyl modified nucleotide
  modified_base 37: mod_base = OTHER; note = 2'-O-methyl modified nucleotide
  modified_base 38: mod_base = OTHER; note = 2'-O-methyl modified nucleotide
  modified_base 39: mod_base = OTHER; note = 2'-O-methyl modified nucleotide
  modified_base 40: mod_base = OTHER; note = 2'-O-methyl modified nucleotide
  modified_base 69: mod_base = OTHER; note = 2'-O-methyl modified nucleotide
  modified_base 70: mod_base = OTHER; note = 2'-O-methyl modified nucleotide
  modified_base 71: mod_base = OTHER; note = 2'-O-methyl modified nucleotide
  modified_base 72: mod_base = OTHER; note = 2'-O-methyl modified nucleotide
  modified_base 73: mod_base = OTHER; note = 2'-O-methyl modified nucleotide
  modified_base 74: mod_base = OTHER; note = 2'-O-methyl modified nucleotide
  modified_base 75: mod_base = OTHER; note = 2'-O-methyl modified nucleotide
  modified_base 76: mod_base = OTHER; note = 2'-O-methyl modified nucleotide
  modified_base 77: mod_base = OTHER; note = 2'-O-methyl modified nucleotide
  modified_base 78: mod_base = OTHER; note = 2'-O-methyl modified nucleotide
  modified_base 79: mod_base = OTHER; note = 2'-O-methyl modified nucleotide
  modified_base 80: mod_base = OTHER; note = 2'-O-methyl modified nucleotide
  modified_base 81: mod_base = OTHER; note = 2'-O-methyl modified nucleotide
  modified_base 82: mod_base = OTHER; note = 2'-O-methyl modified nucleotide
  modified_base 83: mod_base = OTHER; note = 2'-O-methyl modified nucleotide
  modified_base 84: mod_base = OTHER; note = 2'-O-methyl modified nucleotide
  modified_base 85: mod_base = OTHER; note = 2'-O-methyl modified nucleotide
  modified_base 86: mod_base = OTHER; note = 2'-O-methyl modified nucleotide
  modified_base 87: mod_base = OTHER; note = 2'-O-methyl modified nucleotide
  modified_base 88: mod_base = OTHER; note = 2'-O-methyl modified nucleotide
  modified_base 89: mod_base = OTHER; note = 2'-O-methyl modified nucleotide
  modified_base 90: mod_base = OTHER; note = 2'-O-methyl modified nucleotide
  modified_base 91: mod_base = OTHER; note = 2'-O-methyl modified nucleotide
  modified_base 92: mod_base = OTHER; note = 2'-O-methyl modified nucleotide
  modified_base 93: mod_base = OTHER; note = 2'-O-methyl modified nucleotide
  modified_base 94: mod_base = OTHER; note = 2'-O-methyl modified nucleotide
  modified_base 95: mod_base = OTHER; note = 2'-O-methyl modified nucleotide
  modified_base 96: mod_base = OTHER; note = 2'-O-methyl modified nucleotide
  modified_base 115: mod_base = OTHER; note = Nucleotide with phosphorothioate linkage
  modified_base 116: mod_base = OTHER; note = 2'-O-methyl modified nucleotide with phosphorothioate linkage
  modified_base 117: mod_base = OTHER; note = 2'-O-methyl modified nucleotide with phosphorothioate linkage
  modified_base 118: mod_base = OTHER; note = 2'-O-methyl modified nucleotide
gctggtacacggcagggtcagttttagagctagaaatagcaagttaaaataaggctagtccgttatcaacttgaaaaagtggcaccgagtcggtgccagatatccagtgaccctgccg

SEQ ID NO: 16697 - RNA, 125 nt, synthetic construct
  source 1..125: mol_type = other RNA
  modified_base 1: mod_base = OTHER; note = 2'-O-methyl modified nucleotide with phosphorothioate linkage
  modified_base 2: mod_base = OTHER; note = 2'-O-methyl modified nucleotide with phosphorothioate linkage
  modified_base 3: mod_base = OTHER; note = 2'-O-methyl modified nucleotide with phosphorothioate linkage
  modified_base 29: mod_base = OTHER; note = 2'-O-methyl modified nucleotide
  modified_base 30: mod_base = OTHER; note = 2'-O-methyl modified nucleotide
  modified_base 31: mod_base = OTHER; note = 2'-O-methyl modified nucleotide
  modified_base 32: mod_base = OTHER; note = 2'-O-methyl modified nucleotide
  modified_base 33: mod_base = OTHER; note = 2'-O-methyl modified nucleotide
  modified_base 34: mod_base = OTHER; note = 2'-O-methyl modified nucleotide
  modified_base 35: mod_base = OTHER; note = 2'-O-methyl modified nucleotide
  modified_base 36: mod_base = OTHER; note = 2'-O-methyl modified nucleotide
  modified_base 37: mod_base = OTHER; note = 2'-O-methyl modified nucleotide
  modified_base 38: mod_base = OTHER; note = 2'-O-methyl modified nucleotide
  modified_base 39: mod_base = OTHER; note = 2'-O-methyl modified nucleotide
  modified_base 40: mod_base = OTHER; note = 2'-O-methyl modified nucleotide
  modified_base 69: mod_base = OTHER; note = 2'-O-methyl modified nucleotide
  modified_base 70: mod_base = OTHER; note = 2'-O-methyl modified nucleotide
  modified_base 71: mod_base = OTHER; note = 2'-O-methyl modified nucleotide
  modified_base 72: mod_base = OTHER; note = 2'-O-methyl modified nucleotide
  modified_base 73: mod_base = OTHER; note = 2'-O-methyl modified nucleotide
  modified_base 74: mod_base = OTHER; note = 2'-O-methyl modified nucleotide
  modified_base 75: mod_base = OTHER; note = 2'-O-methyl modified nucleotide
  modified_base 76: mod_base = OTHER; note = 2'-O-methyl modified nucleotide
  modified_base 77: mod_base = OTHER; note = 2'-O-methyl modified nucleotide
  modified_base 78: mod_base = OTHER; note = 2'-O-methyl modified nucleotide
  modified_base 79: mod_base = OTHER; note = 2'-O-methyl modified nucleotide
  modified_base 80: mod_base = OTHER; note = 2'-O-methyl modified nucleotide
  modified_base 81: mod_base = OTHER; note = 2'-O-methyl modified nucleotide
  modified_base 82: mod_base = OTHER; note = 2'-O-methyl modified nucleotide
  modified_base 83: mod_base = OTHER; note = 2'-O-methyl modified nucleotide
  modified_base 84: mod_base = OTHER; note = 2'-O-methyl modified nucleotide
  modified_base 85: mod_base = OTHER; note = 2'-O-methyl modified nucleotide
  modified_base 86: mod_base = OTHER; note = 2'-O-methyl modified nucleotide
  modified_base 87: mod_base = OTHER; note = 2'-O-methyl modified nucleotide
  modified_base 88: mod_base = OTHER; note = 2'-O-methyl modified nucleotide
  modified_base 89: mod_base = OTHER; note = 2'-O-methyl modified nucleotide
  modified_base 90: mod_base = OTHER; note = 2'-O-methyl modified nucleotide
  modified_base 91: mod_base = OTHER; note = 2'-O-methyl modified nucleotide
  modified_base 92: mod_base = OTHER; note = 2'-O-methyl modified nucleotide
  modified_base 93: mod_base = OTHER; note = 2'-O-methyl modified nucleotide
  modified_base 94: mod_base = OTHER; note = 2'-O-methyl modified nucleotide
  modified_base 95: mod_base = OTHER; note = 2'-O-methyl modified nucleotide
  modified_base 96: mod_base = OTHER; note = 2'-O-methyl modified nucleotide
  modified_base 122: mod_base = OTHER; note = Nucleotide with phosphorothioate linkage
  modified_base 123: mod_base = OTHER; note = 2'-O-methyl modified nucleotide with phosphorothioate linkage
  modified_base 124: mod_base = OTHER; note = 2'-O-methyl modified nucleotide with phosphorothioate linkage
  modified_base 125: mod_base = OTHER; note = 2'-O-methyl modified nucleotide
gctggtacacggcagggtcagttttagagctagaaatagcaagttaaaataaggctagtccgttatcaacttgaaaaagtggcaccgagtcggtgccacagatatccagtgaccctgccgtgtac

SEQ ID NO: 16698 - RNA, 124 nt, synthetic construct
  source 1..124: mol_type = other RNA
  modified_base 1: mod_base = OTHER; note = 2'-O-methyl modified nucleotide with phosphorothioate linkage
  modified_base 2: mod_base = OTHER; note = 2'-O-methyl modified nucleotide with phosphorothioate linkage
  modified_base 3: mod_base = OTHER; note = 2'-O-methyl modified nucleotide with phosphorothioate linkage
  modified_base 29: mod_base = OTHER; note = 2'-O-methyl modified nucleotide
  modified_base 30: mod_base = OTHER; note = 2'-O-methyl modified nucleotide
  modified_base 31: mod_base = OTHER; note = 2'-O-methyl modified nucleotide
  modified_base 32: mod_base = OTHER; note = 2'-O-methyl modified nucleotide
  modified_base 33: mod_base = OTHER; note = 2'-O-methyl modified nucleotide
  modified_base 34: mod_base = OTHER; note = 2'-O-methyl modified nucleotide
  modified_base 35: mod_base = OTHER; note = 2'-O-methyl modified nucleotide
  modified_base 36: mod_base = OTHER; note = 2'-O-methyl modified nucleotide
  modified_base 37: mod_base = OTHER; note = 2'-O-methyl modified nucleotide
  modified_base 38: mod_base = OTHER; note = 2'-O-methyl modified nucleotide
  modified_base 39: mod_base = OTHER; note = 2'-O-methyl modified nucleotide
  modified_base 40: mod_base = OTHER; note = 2'-O-methyl modified nucleotide
  modified_base 69: mod_base = OTHER; note = 2'-O-methyl modified nucleotide
  modified_base 70: mod_base = OTHER; note = 2'-O-methyl modified nucleotide
  modified_base 71: mod_base = OTHER; note = 2'-O-methyl modified nucleotide
  modified_base 72: mod_base = OTHER; note = 2'-O-methyl modified nucleotide
  modified_base 73: mod_base = OTHER; note = 2'-O-methyl modified nucleotide
  modified_base 74: mod_base = OTHER; note = 2'-O-methyl modified nucleotide
  modified_base 75: mod_base = OTHER; note = 2'-O-methyl modified nucleotide
  modified_base 76: mod_base = OTHER; note = 2'-O-methyl modified nucleotide
  modified_base 77: mod_base = OTHER; note = 2'-O-methyl modified nucleotide
  modified_base 78: mod_base = OTHER; note = 2'-O-methyl modified nucleotide
  modified_base 79: mod_base = OTHER; note = 2'-O-methyl modified nucleotide
  modified_base 80: mod_base = OTHER; note = 2'-O-methyl modified nucleotide
  modified_base 81: mod_base = OTHER; note = 2'-O-methyl modified nucleotide
  modified_base 82: mod_base = OTHER; note = 2'-O-methyl modified nucleotide
  modified_base 83: mod_base = OTHER; note = 2'-O-methyl modified nucleotide
  modified_base 84: mod_base = OTHER; note = 2'-O-methyl modified nucleotide
  modified_base 85: mod_base = OTHER; note = 2'-O-methyl modified nucleotide
  modified_base 86: mod_base = OTHER; note = 2'-O-methyl modified nucleotide
  modified_base 87: mod_base = OTHER; note = 2'-O-methyl modified nucleotide
  modified_base 88: mod_base = OTHER; note = 2'-O-methyl modified nucleotide
  modified_base 89: mod_base = OTHER; note = 2'-O-methyl modified nucleotide
  modified_base 90: mod_base = OTHER; note = 2'-O-methyl modified nucleotide
  modified_base 91: mod_base = OTHER; note = 2'-O-methyl modified nucleotide
  modified_base 92: mod_base = OTHER; note = 2'-O-methyl modified nucleotide
  modified_base 93: mod_base = OTHER; note = 2'-O-methyl modified nucleotide
  modified_base 94: mod_base = OTHER; note = 2'-O-methyl modified nucleotide
  modified_base 95: mod_base = OTHER; note = 2'-O-methyl modified nucleotide
  modified_base 96: mod_base = OTHER; note = 2'-O-methyl modified nucleotide
  modified_base 121: mod_base = OTHER; note = Nucleotide with phosphorothioate linkage
  modified_base 122: mod_base = OTHER; note = 2'-O-methyl modified nucleotide with phosphorothioate linkage
  modified_base 123: mod_base = OTHER; note = 2'-O-methyl modified nucleotide with phosphorothioate linkage
  modified_base 124: mod_base = OTHER; note = 2'-O-methyl modified nucleotide
gctggtacacggcagggtcagttttagagctagaaatagcaagttaaaataaggctagtccgttatcaacttgaaaaagtggcaccgagtcggtgccacagatatccagtgaccctgccgtgta

SEQ ID NO: 16699 - RNA, 123 nt, synthetic construct
  source 1..123: mol_type = other RNA
  modified_base 1: mod_base = OTHER; note = 2'-O-methyl modified nucleotide with phosphorothioate linkage
  modified_base 2: mod_base = OTHER; note = 2'-O-methyl modified nucleotide with phosphorothioate linkage
  modified_base 3: mod_base = OTHER; note = 2'-O-methyl modified nucleotide with phosphorothioate linkage
  modified_base 29: mod_base = OTHER; note = 2'-O-methyl modified nucleotide
  modified_base 30: mod_base = OTHER; note = 2'-O-methyl modified nucleotide
  modified_base 31: mod_base = OTHER; note = 2'-O-methyl modified nucleotide
  modified_base 32: mod_base = OTHER; note = 2'-O-methyl modified nucleotide
  modified_base 33: mod_base = OTHER; note = 2'-O-methyl modified nucleotide
  modified_base 34: mod_base = OTHER; note = 2'-O-methyl modified nucleotide
  modified_base 35: mod_base = OTHER; note = 2'-O-methyl modified nucleotide
  modified_base 36: mod_base = OTHER; note = 2'-O-methyl modified nucleotide
  modified_base 37: mod_base = OTHER; note = 2'-O-methyl modified nucleotide
  modified_base 38: mod_base = OTHER; note = 2'-O-methyl modified nucleotide
  modified_base 39: mod_base = OTHER; note = 2'-O-methyl modified nucleotide
  modified_base 40: mod_base = OTHER; note = 2'-O-methyl modified nucleotide
  modified_base 69: mod_base = OTHER; note = 2'-O-methyl modified nucleotide
  modified_base 70: mod_base = OTHER; note = 2'-O-methyl modified nucleotide
  modified_base 71: mod_base = OTHER; note = 2'-O-methyl modified nucleotide
  modified_base 72: mod_base = OTHER; note = 2'-O-methyl modified nucleotide
  modified_base 73: mod_base = OTHER; note = 2'-O-methyl modified nucleotide
  modified_base 74: mod_base = OTHER; note = 2'-O-methyl modified nucleotide
  modified_base 75: mod_base = OTHER; note = 2'-O-methyl modified nucleotide
  modified_base 76: mod_base = OTHER; note = 2'-O-methyl modified nucleotide
  modified_base 77: mod_base = OTHER; note = 2'-O-methyl modified nucleotide
  modified_base 78: mod_base = OTHER; note = 2'-O-methyl modified nucleotide
  modified_base 79: mod_base = OTHER; note = 2'-O-methyl modified nucleotide
  modified_base 80: mod_base = OTHER; note = 2'-O-methyl modified nucleotide
  modified_base 81: mod_base = OTHER; note = 2'-O-methyl modified nucleotide
  modified_base 82: mod_base = OTHER; note = 2'-O-methyl modified nucleotide
  modified_base 83: mod_base = OTHER; note = 2'-O-methyl modified nucleotide
  modified_base 84: mod_base = OTHER; note = 2'-O-methyl modified nucleotide
  modified_base 85: mod_base = OTHER; note = 2'-O-methyl modified nucleotide
  modified_base 86: mod_base = OTHER; note = 2'-O-methyl modified nucleotide
  modified_base 87: mod_base = OTHER; note = 2'-O-methyl modified nucleotide
  modified_base 88: mod_base = OTHER; note = 2'-O-methyl modified nucleotide
  modified_base 89: mod_base = OTHER; note = 2'-O-methyl modified nucleotide
  modified_base 90: mod_base = OTHER; note = 2'-O-methyl modified nucleotide
  modified_base 91: mod_base = OTHER; note = 2'-O-methyl modified nucleotide
  modified_base 92: mod_base = OTHER; note = 2'-O-methyl modified nucleotide
  modified_base 93: mod_base = OTHER; note = 2'-O-methyl modified nucleotide
  modified_base 94: mod_base = OTHER; note = 2'-O-methyl modified nucleotide
  modified_base 95: mod_base = OTHER; note = 2'-O-methyl modified nucleotide
  modified_base 96: mod_base = OTHER; note = 2'-O-methyl modified nucleotide
  modified_base 120: mod_base = OTHER; note = Nucleotide with phosphorothioate linkage
  modified_base 121: mod_base = OTHER; note = 2'-O-methyl modified nucleotide with phosphorothioate linkage
  modified_base 122: mod_base = OTHER; note = 2'-O-methyl modified nucleotide with phosphorothioate linkage
  modified_base 123: mod_base = OTHER; note = 2'-O-methyl modified nucleotide
gctggtacacggcagggtcagttttagagctagaaatagcaagttaaaataaggctagtccgttatcaacttgaaaaagtggcaccgagtcggtgccacagatatccagtgaccctgccgtgt

SEQ ID NO: 16700 - RNA, 122 nt, synthetic construct
  source 1..122: mol_type = other RNA
  modified_base 1: mod_base = OTHER; note = 2'-O-methyl modified nucleotide with phosphorothioate linkage
  modified_base 2: mod_base = OTHER; note = 2'-O-methyl modified nucleotide with phosphorothioate linkage
  modified_base 3: mod_base = OTHER; note = 2'-O-methyl modified nucleotide with phosphorothioate linkage
  modified_base 29: mod_base = OTHER; note = 2'-O-methyl modified nucleotide
  modified_base 30: mod_base = OTHER; note = 2'-O-methyl modified nucleotide
  modified_base 31: mod_base = OTHER; note = 2'-O-methyl modified nucleotide
  modified_base 32: mod_base = OTHER; note = 2'-O-methyl modified nucleotide
  modified_base 33: mod_base = OTHER; note = 2'-O-methyl modified nucleotide
  modified_base 34: mod_base = OTHER; note = 2'-O-methyl modified nucleotide
  modified_base 35: mod_base = OTHER; note = 2'-O-methyl modified nucleotide
  modified_base 36: mod_base = OTHER; note = 2'-O-methyl modified nucleotide
  modified_base 37: mod_base = OTHER; note = 2'-O-methyl modified nucleotide
  modified_base 38: mod_base = OTHER; note = 2'-O-methyl modified nucleotide
  modified_base 39: mod_base = OTHER; note = 2'-O-methyl modified nucleotide
  modified_base 40: mod_base = OTHER; note = 2'-O-methyl modified nucleotide
  modified_base 69: mod_base = OTHER; note = 2'-O-methyl modified nucleotide
  modified_base 70: mod_base = OTHER; note = 2'-O-methyl modified nucleotide
  modified_base 71: mod_base = OTHER; note = 2'-O-methyl modified nucleotide
  modified_base 72: mod_base = OTHER; note = 2'-O-methyl modified nucleotide
  modified_base 73: mod_base = OTHER; note = 2'-O-methyl modified nucleotide
  modified_base 74: mod_base = OTHER; note = 2'-O-methyl modified nucleotide
  modified_base 75: mod_base = OTHER; note = 2'-O-methyl modified nucleotide
  modified_base 76: mod_base = OTHER; note = 2'-O-methyl modified nucleotide
  modified_base 77: mod_base = OTHER; note = 2'-O-methyl modified nucleotide
  modified_base 78: mod_base = OTHER; note = 2'-O-methyl modified nucleotide
  modified_base 79: mod_base = OTHER; note = 2'-O-methyl modified nucleotide
  modified_base 80: mod_base = OTHER; note = 2'-O-methyl modified nucleotide
  modified_base 81: mod_base = OTHER; note = 2'-O-methyl modified nucleotide
  modified_base 82: mod_base = OTHER; note = 2'-O-methyl modified nucleotide
  modified_base 83: mod_base = OTHER; note = 2'-O-methyl modified nucleotide
  modified_base 84: mod_base = OTHER; note = 2'-O-methyl modified nucleotide
  modified_base 85: mod_base = OTHER; note = 2'-O-methyl modified nucleotide
  modified_base 86: mod_base = OTHER; note = 2'-O-methyl modified nucleotide
  modified_base 87: mod_base = OTHER; note = 2'-O-methyl modified nucleotide
  modified_base 88: mod_base = OTHER; note = 2'-O-methyl modified nucleotide
  modified_base 89: mod_base = OTHER; note = 2'-O-methyl modified nucleotide
  modified_base 90: mod_base = OTHER; note = 2'-O-methyl modified nucleotide
  modified_base 91: mod_base = OTHER; note = 2'-O-methyl modified nucleotide
  modified_base 92: mod_base = OTHER; note = 2'-O-methyl modified nucleotide
  modified_base 93: mod_base = OTHER; note = 2'-O-methyl modified nucleotide
  modified_base 94: mod_base = OTHER; note = 2'-O-methyl modified nucleotide
  modified_base 95: mod_base = OTHER; note = 2'-O-methyl modified nucleotide
  modified_base 96: mod_base = OTHER; note = 2'-O-methyl modified nucleotide
  modified_base 119: mod_base = OTHER; note = Nucleotide with phosphorothioate linkage
  modified_base 120: mod_base = OTHER; note = 2'-O-methyl modified nucleotide with phosphorothioate linkage
  modified_base 121: mod_base = OTHER; note = 2'-O-methyl modified nucleotide with phosphorothioate linkage
  modified_base 122: mod_base = OTHER; note = 2'-O-methyl modified nucleotide
gctggtacacggcagggtcagttttagagctagaaatagcaagttaaaataaggctagtccgttatcaacttgaaaaagtggcaccgagtcggtgccacagatatccagtgaccctgccgtg

SEQ ID NO: 16701 - RNA, 121 nt, synthetic construct
  source 1..121: mol_type = other RNA
  modified_base 1: mod_base = OTHER; note = 2'-O-methyl modified nucleotide with phosphorothioate linkage
  modified_base 2: mod_base = OTHER; note = 2'-O-methyl modified nucleotide with phosphorothioate linkage
  modified_base 3: mod_base = OTHER; note = 2'-O-methyl modified nucleotide with phosphorothioate linkage
  modified_base 29: mod_base = OTHER; note = 2'-O-methyl modified nucleotide
  modified_base 30: mod_base = OTHER; note = 2'-O-methyl modified nucleotide
  modified_base 31: mod_base = OTHER; note = 2'-O-methyl modified nucleotide
  modified_base 32: mod_base = OTHER; note = 2'-O-methyl modified nucleotide
  modified_base 33: mod_base = OTHER; note = 2'-O-methyl modified nucleotide
  modified_base 34: mod_base = OTHER; note = 2'-O-methyl modified nucleotide
  modified_base 35: mod_base = OTHER; note = 2'-O-methyl modified nucleotide
  modified_base 36: mod_base = OTHER; note = 2'-O-methyl modified nucleotide
  modified_base 37: mod_base = OTHER; note = 2'-O-methyl modified nucleotide
  modified_base 38: mod_base = OTHER; note = 2'-O-methyl modified nucleotide
  modified_base 39: mod_base = OTHER; note = 2'-O-methyl modified nucleotide
  modified_base 40: mod_base = OTHER; note = 2'-O-methyl modified nucleotide
  modified_base 69: mod_base = OTHER; note = 2'-O-methyl modified nucleotide
  modified_base 70: mod_base = OTHER; note = 2'-O-methyl modified nucleotide
  modified_base 71: mod_base = OTHER; note = 2'-O-methyl modified nucleotide
  modified_base 72: mod_base = OTHER; note = 2'-O-methyl modified nucleotide
  modified_base 73: mod_base = OTHER; note = 2'-O-methyl modified nucleotide
  modified_base 74: mod_base = OTHER; note = 2'-O-methyl modified nucleotide
  modified_base 75: mod_base = OTHER; note = 2'-O-methyl modified nucleotide
  modified_base 76: mod_base = OTHER; note = 2'-O-methyl modified nucleotide
  modified_base 77: mod_base = OTHER; note = 2'-O-methyl modified nucleotide
  modified_base 78: mod_base = OTHER; note = 2'-O-methyl modified nucleotide
  modified_base 79: mod_base = OTHER; note = 2'-O-methyl modified nucleotide
  modified_base 80: mod_base = OTHER; note = 2'-O-methyl modified nucleotide
  modified_base 81: mod_base = OTHER; note = 2'-O-methyl modified nucleotide
  modified_base 82: mod_base = OTHER; note = 2'-O-methyl modified nucleotide
  modified_base 83: mod_base = OTHER; note = 2'-O-methyl modified nucleotide
  modified_base 84: mod_base = OTHER; note = 2'-O-methyl modified nucleotide
  modified_base 85: mod_base = OTHER; note = 2'-O-methyl modified nucleotide
  modified_base 86: mod_base = OTHER; note = 2'-O-methyl modified nucleotide
  modified_base 87: mod_base = OTHER; note = 2'-O-methyl modified nucleotide
  modified_base 88: mod_base = OTHER; note = 2'-O-methyl modified nucleotide
  modified_base 89: mod_base = OTHER; note = 2'-O-methyl modified nucleotide
  modified_base 90: mod_base = OTHER; note = 2'-O-methyl modified nucleotide
  modified_base 91: mod_base = OTHER; note = 2'-O-methyl modified nucleotide
  modified_base 92: mod_base = OTHER; note = 2'-O-methyl modified nucleotide
  modified_base 93: mod_base = OTHER; note = 2'-O-methyl modified nucleotide
  modified_base 94: mod_base = OTHER; note = 2'-O-methyl modified nucleotide
  modified_base 95: mod_base = OTHER; note = 2'-O-methyl modified nucleotide
  modified_base 96: mod_base = OTHER; note = 2'-O-methyl modified nucleotide
  modified_base 118: mod_base = OTHER; note = Nucleotide with phosphorothioate linkage
  modified_base 119: mod_base = OTHER; note = 2'-O-methyl modified nucleotide with phosphorothioate linkage
  modified_base 120: mod_base = OTHER; note = 2'-O-methyl modified nucleotide with phosphorothioate linkage
  modified_base 121: mod_base = OTHER; note = 2'-O-methyl modified nucleotide
gctggtacacggcagggtcagttttagagctagaaatagcaagttaaaataaggctagtccgttatcaacttgaaaaagtggcaccgagtcggtgccacagatatccagtgaccctgccgt

SEQ ID NO: 16702 - RNA, 120 nt, synthetic construct
  source 1..120: mol_type = other RNA
  modified_base 1: mod_base = OTHER; note = 2'-O-methyl modified nucleotide with phosphorothioate linkage
  modified_base 2: mod_base = OTHER; note = 2'-O-methyl modified nucleotide with phosphorothioate linkage
  modified_base 3: mod_base = OTHER; note = 2'-O-methyl modified nucleotide with phosphorothioate linkage
  modified_base 29: mod_base = OTHER; note = 2'-O-methyl modified nucleotide
  modified_base 30: mod_base = OTHER; note = 2'-O-methyl modified nucleotide
  modified_base 31: mod_base = OTHER; note = 2'-O-methyl modified nucleotide
  modified_base 32: mod_base = OTHER; note = 2'-O-methyl modified nucleotide
  modified_base 33: mod_base = OTHER; note = 2'-O-methyl modified nucleotide
  modified_base 34: mod_base = OTHER; note = 2'-O-methyl modified nucleotide
  modified_base 35: mod_base = OTHER; note = 2'-O-methyl modified nucleotide
  modified_base 36: mod_base = OTHER; note = 2'-O-methyl modified nucleotide
  modified_base 37: mod_base = OTHER; note = 2'-O-methyl modified nucleotide
  modified_base 38: mod_base = OTHER; note = 2'-O-methyl modified nucleotide
  modified_base 39: mod_base = OTHER; note = 2'-O-methyl modified nucleotide
  modified_base 40: mod_base = OTHER; note = 2'-O-methyl modified nucleotide
  modified_base 69: mod_base = OTHER; note = 2'-O-methyl modified nucleotide
  modified_base 70: mod_base = OTHER; note = 2'-O-methyl modified nucleotide
  modified_base 71: mod_base = OTHER; note = 2'-O-methyl modified nucleotide
  modified_base 72: mod_base = OTHER; note = 2'-O-methyl modified nucleotide
  modified_base 73: mod_base = OTHER; note = 2'-O-methyl modified nucleotide
  modified_base 74: mod_base = OTHER; note = 2'-O-methyl modified nucleotide
  modified_base 75: mod_base = OTHER; note = 2'-O-methyl modified nucleotide
  modified_base 76: mod_base = OTHER; note = 2'-O-methyl modified nucleotide
  modified_base 77: mod_base = OTHER; note = 2'-O-methyl modified nucleotide
  modified_base 78: mod_base = OTHER; note = 2'-O-methyl modified nucleotide
  modified_base 79: mod_base = OTHER; note = 2'-O-methyl modified nucleotide
  modified_base 80: mod_base = OTHER; note = 2'-O-methyl modified nucleotide
  modified_base 81: mod_base = OTHER; note = 2'-O-methyl modified nucleotide
  modified_base 82: mod_base = OTHER; note = 2'-O-methyl modified nucleotide
  modified_base 83: mod_base = OTHER; note = 2'-O-methyl modified nucleotide
  modified_base 84: mod_base = OTHER; note = 2'-O-methyl modified nucleotide
  modified_base 85: mod_base = OTHER; note = 2'-O-methyl modified nucleotide
  modified_base 86: mod_base = OTHER; note = 2'-O-methyl modified nucleotide
  modified_base 87: mod_base = OTHER; note = 2'-O-methyl modified nucleotide
  modified_base 88: mod_base = OTHER; note = 2'-O-methyl modified nucleotide
  modified_base 89: mod_base = OTHER; note = 2'-O-methyl modified nucleotide
  modified_base 90: mod_base = OTHER; note = 2'-O-methyl modified nucleotide
  modified_base 91: mod_base = OTHER; note = 2'-O-methyl modified nucleotide
  modified_base 92: mod_base = OTHER; note = 2'-O-methyl modified nucleotide
  modified_base 93: mod_base = OTHER; note = 2'-O-methyl modified nucleotide
  modified_base 94: mod_base = OTHER; note = 2'-O-methyl modified nucleotide
  modified_base 95: mod_base = OTHER; note = 2'-O-methyl modified nucleotide
  modified_base 96: mod_base = OTHER; note = 2'-O-methyl modified nucleotide
  modified_base 117: mod_base = OTHER; note = Nucleotide with phosphorothioate linkage
  modified_base 118: mod_base = OTHER; note = 2'-O-methyl modified nucleotide with phosphorothioate linkage
  modified_base 119: mod_base = OTHER; note = 2'-O-methyl modified nucleotide with phosphorothioate linkage
  modified_base 120: mod_base = OTHER; note = 2'-O-methyl modified nucleotide
gctggtacacggcagggtcagttttagagctagaaatagcaagttaaaataaggctagtccgttatcaacttgaaaaagtggcaccgagtcggtgccacagatatccagtgaccctgccg

SEQ ID NO: 16703 - RNA, 127 nt, synthetic construct
  source 1..127: mol_type = other RNA
  modified_base 1: mod_base = OTHER; note = 2'-O-methyl modified nucleotide with phosphorothioate linkage
  modified_base 2: mod_base = OTHER; note = 2'-O-methyl modified nucleotide with phosphorothioate linkage
  modified_base 3: mod_base = OTHER; note = 2'-O-methyl modified nucleotide with phosphorothioate linkage
  modified_base 29: mod_base = OTHER; note = 2'-O-methyl modified nucleotide
  modified_base 30: mod_base = OTHER; note = 2'-O-methyl modified nucleotide
  modified_base 31: mod_base = OTHER; note = 2'-O-methyl modified nucleotide
  modified_base 32: mod_base = OTHER; note = 2'-O-methyl modified nucleotide
  modified_base 33: mod_base = OTHER; note = 2'-O-methyl modified nucleotide
  modified_base 34: mod_base = OTHER; note = 2'-O-methyl modified nucleotide
  modified_base 35: mod_base = OTHER; note = 2'-O-methyl modified nucleotide
  modified_base 36: mod_base = OTHER; note = 2'-O-methyl modified nucleotide
  modified_base 37: mod_base = OTHER; note = 2'-O-methyl modified nucleotide
  modified_base 38: mod_base = OTHER; note = 2'-O-methyl modified nucleotide
  modified_base 39: mod_base = OTHER; note = 2'-O-methyl modified nucleotide
  modified_base 40: mod_base = OTHER; note = 2'-O-methyl modified nucleotide
  modified_base 69: mod_base = OTHER; note = 2'-O-methyl modified nucleotide
  modified_base 70: mod_base = OTHER; note = 2'-O-methyl modified nucleotide
  modified_base 71: mod_base = OTHER; note = 2'-O-methyl modified nucleotide
  modified_base 72: mod_base = OTHER; note = 2'-O-methyl modified nucleotide
  modified_base 73: mod_base = OTHER; note = 2'-O-methyl modified nucleotide
  modified_base 74: mod_base = OTHER; note = 2'-O-methyl modified nucleotide
  modified_base 75: mod_base = OTHER; note = 2'-O-methyl modified nucleotide
  modified_base 76: mod_base = OTHER; note = 2'-O-methyl modified nucleotide
  modified_base 77: mod_base = OTHER; note = 2'-O-methyl modified nucleotide
  modified_base 78: mod_base = OTHER; note = 2'-O-methyl modified nucleotide
  modified_base 79: mod_base = OTHER; note = 2'-O-methyl modified nucleotide
  modified_base 80: mod_base = OTHER; note = 2'-O-methyl modified nucleotide
  modified_base 81: mod_base = OTHER; note = 2'-O-methyl modified nucleotide
  modified_base 82: mod_base = OTHER; note = 2'-O-methyl modified nucleotide
  modified_base 83: mod_base = OTHER; note = 2'-O-methyl modified nucleotide
  modified_base 84: mod_base = OTHER; note = 2'-O-methyl modified nucleotide
  modified_base 85: mod_base = OTHER; note = 2'-O-methyl modified nucleotide
  modified_base 86: mod_base = OTHER; note = 2'-O-methyl modified nucleotide
  modified_base 87: mod_base = OTHER; note = 2'-O-methyl modified nucleotide
  modified_base 88: mod_base = OTHER; note = 2'-O-methyl modified nucleotide
  modified_base 89: mod_base = OTHER; note = 2'-O-methyl modified nucleotide
  modified_base 90: mod_base = OTHER; note = 2'-O-methyl modified nucleotide
  modified_base 91: mod_base = OTHER; note = 2'-O-methyl modified nucleotide
  modified_base 92: mod_base = OTHER; note = 2'-O-methyl modified nucleotide
  modified_base 93: mod_base = OTHER; note = 2'-O-methyl modified nucleotide
  modified_base 94: mod_base = OTHER; note = 2'-O-methyl modified nucleotide
  modified_base 95: mod_base = OTHER; note = 2'-O-methyl modified nucleotide
  modified_base 96: mod_base = OTHER; note = 2'-O-methyl modified nucleotide
  modified_base 124: mod_base = OTHER; note = Nucleotide with phosphorothioate linkage
  modified_base 125: mod_base = OTHER; note = 2'-O-methyl modified nucleotide with phosphorothioate linkage
  modified_base 126: mod_base = OTHER; note = 2'-O-methyl modified nucleotide with phosphorothioate linkage
  modified_base 127: mod_base = OTHER; note = 2'-O-methyl modified nucleotide
gctggtacacggcagggtcagttttagagctagaaatagcaagttaaaataaggctagtccgttatcaacttgaaaaagtggcaccgagtcggtgccccacagatatccagtgaccctgccgtgtac

SEQ ID NO: 16704 - RNA, 126 nt, synthetic construct
  source 1..126: mol_type = other RNA
  modified_base 1: mod_base = OTHER; note = 2'-O-methyl modified nucleotide with phosphorothioate linkage
  modified_base 2: mod_base = OTHER; note = 2'-O-methyl modified nucleotide with phosphorothioate linkage
  modified_base 3: mod_base = OTHER; note = 2'-O-methyl modified nucleotide with phosphorothioate linkage
  modified_base 29: mod_base = OTHER; note = 2'-O-methyl modified nucleotide
  modified_base 30: mod_base = OTHER; note = 2'-O-methyl modified nucleotide
  modified_base 31: mod_base = OTHER; note = 2'-O-methyl modified nucleotide
  modified_base 32: mod_base = OTHER; note = 2'-O-methyl modified nucleotide
  modified_base 33: mod_base = OTHER; note = 2'-O-methyl modified nucleotide
  modified_base 34: mod_base = OTHER; note = 2'-O-methyl modified nucleotide
  modified_base 35: mod_base = OTHER; note = 2'-O-methyl modified nucleotide
  modified_base 36: mod_base = OTHER; note = 2'-O-methyl modified nucleotide
  modified_base 37: mod_base = OTHER; note = 2'-O-methyl modified nucleotide
  modified_base 38: mod_base = OTHER; note = 2'-O-methyl modified nucleotide
  modified_base 39: mod_base = OTHER; note = 2'-O-methyl modified nucleotide
  modified_base 40: mod_base = OTHER; note = 2'-O-methyl modified nucleotide
  modified_base 69: mod_base = OTHER; note = 2'-O-methyl modified nucleotide
  modified_base 70: mod_base = OTHER; note = 2'-O-methyl modified nucleotide
  modified_base 71: mod_base = OTHER; note = 2'-O-methyl modified nucleotide
  modified_base 72: mod_base = OTHER; note = 2'-O-methyl modified nucleotide
  modified_base 73: mod_base = OTHER; note = 2'-O-methyl modified nucleotide
  modified_base 74: mod_base = OTHER; note = 2'-O-methyl modified nucleotide
  modified_base 75: mod_base = OTHER; note = 2'-O-methyl modified nucleotide
  modified_base 76: mod_base = OTHER; note = 2'-O-methyl modified nucleotide
  modified_base 77: mod_base = OTHER; note = 2'-O-methyl modified nucleotide
  modified_base 78: mod_base = OTHER; note = 2'-O-methyl modified nucleotide
  modified_base 79: mod_base = OTHER; note = 2'-O-methyl modified nucleotide
  modified_base 80: mod_base = OTHER; note = 2'-O-methyl modified nucleotide
  modified_base 81: mod_base = OTHER; note = 2'-O-methyl modified nucleotide
  modified_base 82: mod_base = OTHER; note = 2'-O-methyl modified nucleotide
  modified_base 83: mod_base = OTHER; note = 2'-O-methyl modified nucleotide
  modified_base 84: mod_base = OTHER; note = 2'-O-methyl modified nucleotide
  modified_base 85: mod_base = OTHER; note = 2'-O-methyl modified nucleotide
  modified_base 86: mod_base = OTHER; note = 2'-O-methyl modified nucleotide
  modified_base 87: mod_base = OTHER; note = 2'-O-methyl modified nucleotide
  modified_base 88: mod_base = OTHER; note = 2'-O-methyl modified nucleotide
  modified_base 89: mod_base = OTHER; note = 2'-O-methyl modified nucleotide
  modified_base 90: mod_base = OTHER; note = 2'-O-methyl modified nucleotide
  modified_base 91: mod_base = OTHER; note = 2'-O-methyl modified nucleotide
  modified_base 92: mod_base = OTHER; note = 2'-O-methyl modified nucleotide
  modified_base 93: mod_base = OTHER; note = 2'-O-methyl modified nucleotide
  modified_base 94: mod_base = OTHER; note = 2'-O-methyl modified nucleotide
  modified_base 95: mod_base = OTHER; note = 2'-O-methyl modified nucleotide
  modified_base 96: mod_base = OTHER; note = 2'-O-methyl modified nucleotide
  modified_base 123: mod_base = OTHER; note = Nucleotide with phosphorothioate linkage
  modified_base 124: mod_base = OTHER; note = 2'-O-methyl modified nucleotide with phosphorothioate linkage
  modified_base 125: mod_base = OTHER; note = 2'-O-methyl modified nucleotide with phosphorothioate linkage
  modified_base 126: mod_base = OTHER; note = 2'-O-methyl modified nucleotide
gctggtacacggcagggtcagttttagagctagaaatagcaagttaaaataaggctagtccgttatcaacttgaaaaagtggcaccgagtcggtgccccacagatatccagtgaccctgccgtgta

SEQ ID NO: 16705 - RNA, 125 nt, synthetic construct
  source 1..125: mol_type = other RNA
  modified_base 1: mod_base = OTHER; note = 2'-O-methyl modified nucleotide with phosphorothioate linkage
  modified_base 2: mod_base = OTHER; note = 2'-O-methyl modified nucleotide with phosphorothioate linkage
  modified_base 3: mod_base = OTHER; note = 2'-O-methyl modified nucleotide with phosphorothioate linkage
  modified_base 29: mod_base = OTHER; note = 2'-O-methyl modified nucleotide
  modified_base 30: mod_base = OTHER; note = 2'-O-methyl modified nucleotide
  modified_base 31: mod_base = OTHER; note = 2'-O-methyl modified nucleotide
  modified_base 32: mod_base = OTHER; note = 2'-O-methyl modified nucleotide
  modified_base 33: mod_base = OTHER; note = 2'-O-methyl modified nucleotide
  modified_base 34: mod_base = OTHER; note = 2'-O-methyl modified nucleotide
  modified_base 35: mod_base = OTHER; note = 2'-O-methyl modified nucleotide
  modified_base 36: mod_base = OTHER; note = 2'-O-methyl modified nucleotide
  modified_base 37: mod_base = OTHER; note = 2'-O-methyl modified nucleotide
  modified_base 38: mod_base = OTHER; note = 2'-O-methyl modified nucleotide
  modified_base 39: mod_base = OTHER; note = 2'-O-methyl modified nucleotide
  modified_base 40: mod_base = OTHER; note = 2'-O-methyl modified nucleotide
  modified_base 69: mod_base = OTHER; note = 2'-O-methyl modified nucleotide
  modified_base 70: mod_base = OTHER; note = 2'-O-methyl modified nucleotide
  modified_base 71: mod_base = OTHER; note = 2'-O-methyl modified nucleotide
  modified_base 72: mod_base = OTHER; note = 2'-O-methyl modified nucleotide
  modified_base 73: mod_base = OTHER; note = 2'-O-methyl modified nucleotide
  modified_base 74: mod_base = OTHER; note = 2'-O-methyl modified nucleotide
  modified_base 75: mod_base = OTHER; note = 2'-O-methyl modified nucleotide
  modified_base 76: mod_base = OTHER; note = 2'-O-methyl modified nucleotide
  modified_base 77: mod_base = OTHER; note = 2'-O-methyl modified nucleotide
  modified_base 78: mod_base = OTHER; note = 2'-O-methyl modified nucleotide
  modified_base 79: mod_base = OTHER; note = 2'-O-methyl modified nucleotide
  modified_base 80: mod_base = OTHER; note = 2'-O-methyl modified nucleotide
  modified_base 81: mod_base = OTHER; note = 2'-O-methyl modified nucleotide
  modified_base 82: mod_base = OTHER; note = 2'-O-methyl modified nucleotide
  modified_base 83: mod_base = OTHER; note = 2'-O-methyl modified nucleotide
  modified_base 84: mod_base = OTHER; note = 2'-O-methyl modified nucleotide
  modified_base 85: mod_base = OTHER; note = 2'-O-methyl modified nucleotide
  modified_base 86: mod_base = OTHER; note = 2'-O-methyl modified nucleotide
  modified_base 87: mod_base = OTHER; note = 2'-O-methyl modified nucleotide
  modified_base 88: mod_base = OTHER; note = 2'-O-methyl modified nucleotide
  modified_base 89: mod_base = OTHER; note = 2'-O-methyl modified nucleotide
  modified_base 90: mod_base = OTHER; note = 2'-O-methyl modified nucleotide
  modified_base 91: mod_base = OTHER; note = 2'-O-methyl modified nucleotide
  modified_base 92: mod_base = OTHER; note = 2'-O-methyl modified nucleotide
  modified_base 93: mod_base = OTHER; note = 2'-O-methyl modified nucleotide
  modified_base 94: mod_base = OTHER; note = 2'-O-methyl modified nucleotide
  modified_base 95: mod_base = OTHER; note = 2'-O-methyl modified nucleotide
  modified_base 96: mod_base = OTHER; note = 2'-O-methyl modified nucleotide
  modified_base 122: mod_base = OTHER; note = Nucleotide with phosphorothioate linkage
  modified_base 123: mod_base = OTHER; note = 2'-O-methyl modified nucleotide with phosphorothioate linkage
  modified_base 124: mod_base = OTHER; note = 2'-O-methyl modified nucleotide with phosphorothioate linkage
  modified_base 125: mod_base = OTHER; note = 2'-O-methyl modified nucleotide
gctggtacacggcagggtcagttttagagctagaaatagcaagttaaaataaggctagtccgttatcaacttgaaaaagtggcaccgagtcggtgccccacagatatccagtgaccctgccgtgt

SEQ ID NO: 16706 - RNA, 124 nt, synthetic construct
  source 1..124: mol_type = other RNA
  modified_base 1: mod_base = OTHER; note = 2'-O-methyl modified nucleotide with phosphorothioate linkage
  modified_base 2: mod_base = OTHER; note = 2'-O-methyl modified nucleotide with phosphorothioate linkage
  modified_base 3: mod_base = OTHER; note = 2'-O-methyl modified nucleotide with phosphorothioate linkage
  modified_base 29: mod_base = OTHER; note = 2'-O-methyl modified nucleotide
  modified_base 30: mod_base = OTHER; note = 2'-O-methyl modified nucleotide
  modified_base 31: mod_base = OTHER; note = 2'-O-methyl modified nucleotide
  modified_base 32: mod_base = OTHER; note = 2'-O-methyl modified nucleotide
  modified_base 33: mod_base = OTHER; note = 2'-O-methyl modified nucleotide
  modified_base 34: mod_base = OTHER; note = 2'-O-methyl modified nucleotide
  modified_base 35: mod_base = OTHER; note = 2'-O-methyl modified nucleotide
  modified_base 36: mod_base = OTHER; note = 2'-O-methyl modified nucleotide
  modified_base 37: mod_base = OTHER; note = 2'-O-methyl modified nucleotide
  modified_base 38: mod_base = OTHER; note = 2'-O-methyl modified nucleotide
  modified_base 39: mod_base = OTHER; note = 2'-O-methyl modified nucleotide
  modified_base 40: mod_base = OTHER; note = 2'-O-methyl modified nucleotide
  modified_base 69: mod_base = OTHER; note = 2'-O-methyl modified nucleotide
  modified_base 70: mod_base = OTHER; note = 2'-O-methyl modified nucleotide
  modified_base 71: mod_base = OTHER; note = 2'-O-methyl modified nucleotide
  modified_base 72: mod_base = OTHER; note = 2'-O-methyl modified nucleotide
  modified_base 73: mod_base = OTHER; note = 2'-O-methyl modified nucleotide
  modified_base 74: mod_base = OTHER; note = 2'-O-methyl modified nucleotide
  modified_base 75: mod_base = OTHER; note = 2'-O-methyl modified nucleotide
  modified_base 76: mod_base = OTHER; note = 2'-O-methyl modified nucleotide
  modified_base 77: mod_base = OTHER; note = 2'-O-methyl modified nucleotide
  modified_base 78: mod_base = OTHER; note = 2'-O-methyl modified nucleotide
  modified_base 79: mod_base = OTHER; note = 2'-O-methyl modified nucleotide
  modified_base 80: mod_base = OTHER; note = 2'-O-methyl modified nucleotide
  modified_base 81: mod_base = OTHER; note = 2'-O-methyl modified nucleotide
  modified_base 82: mod_base = OTHER; note = 2'-O-methyl modified nucleotide
  modified_base 83: mod_base = OTHER; note = 2'-O-methyl modified nucleotide
  modified_base 84: mod_base = OTHER; note = 2'-O-methyl modified nucleotide
  modified_base 85: mod_base = OTHER; note = 2'-O-methyl modified nucleotide
  modified_base 86: mod_base = OTHER; note = 2'-O-methyl modified nucleotide
  modified_base 87: mod_base = OTHER; note = 2'-O-methyl modified nucleotide
  modified_base 88: mod_base = OTHER; note = 2'-O-methyl modified nucleotide
  modified_base 89: mod_base = OTHER; note = 2'-O-methyl modified nucleotide
  modified_base 90: mod_base = OTHER; note = 2'-O-methyl modified nucleotide
  modified_base 91: mod_base = OTHER; note = 2'-O-methyl modified nucleotide
  modified_base 92: mod_base = OTHER; note = 2'-O-methyl modified nucleotide
  modified_base 93: mod_base = OTHER; note = 2'-O-methyl modified nucleotide
  modified_base 94: mod_base = OTHER; note = 2'-O-methyl modified nucleotide
  modified_base 95: mod_base = OTHER; note = 2'-O-methyl modified nucleotide
  modified_base 96: mod_base = OTHER; note = 2'-O-methyl modified nucleotide
  modified_base 121: mod_base = OTHER; note = Nucleotide with phosphorothioate linkage
  modified_base 122: mod_base = OTHER; note = 2'-O-methyl modified nucleotide with phosphorothioate linkage
  modified_base 123: mod_base = OTHER; note = 2'-O-methyl modified nucleotide with phosphorothioate linkage
  modified_base 124: mod_base = OTHER; note = 2'-O-methyl modified nucleotide
gctggtacacggcagggtcagttttagagctagaaatagcaagttaaaataaggctagtccgttatcaacttgaaaaagtggcaccgagtcggtgccccacagatatccagtgaccctgccgtg

SEQ ID NO: 16707 - RNA, 123 nt, synthetic construct
  source 1..123: mol_type = other RNA
  modified_base 1: mod_base = OTHER; note = 2'-O-methyl modified nucleotide with phosphorothioate linkage
  modified_base 2: mod_base = OTHER; note = 2'-O-methyl modified nucleotide with phosphorothioate linkage
  modified_base 3: mod_base = OTHER; note = 2'-O-methyl modified nucleotide with phosphorothioate linkage
  modified_base 29: mod_base = OTHER; note = 2'-O-methyl modified nucleotide
  modified_base 30: mod_base = OTHER; note = 2'-O-methyl modified nucleotide
  modified_base 31: mod_base = OTHER; note = 2'-O-methyl modified nucleotide
  modified_base 32: mod_base = OTHER; note = 2'-O-methyl modified nucleotide
  modified_base 33: mod_base = OTHER; note = 2'-O-methyl modified nucleotide
  modified_base 34: mod_base = OTHER; note = 2'-O-methyl modified nucleotide
  modified_base 35: mod_base = OTHER; note = 2'-O-methyl modified nucleotide
  modified_base 36: mod_base = OTHER; note = 2'-O-methyl modified nucleotide
  modified_base 37: mod_base = OTHER; note = 2'-O-methyl modified nucleotide
  modified_base 38: mod_base = OTHER; note = 2'-O-methyl modified nucleotide
  modified_base 39: mod_base = OTHER; note = 2'-O-methyl modified nucleotide
  modified_base 40: mod_base = OTHER; note = 2'-O-methyl modified nucleotide
  modified_base 69: mod_base = OTHER; note = 2'-O-methyl modified nucleotide
  modified_base 70: mod_base = OTHER; note = 2'-O-methyl modified nucleotide
  modified_base 71: mod_base = OTHER; note = 2'-O-methyl modified nucleotide
  modified_base 72: mod_base = OTHER; note = 2'-O-methyl modified nucleotide
  modified_base 73: mod_base = OTHER; note = 2'-O-methyl modified nucleotide
  modified_base 74: mod_base = OTHER; note = 2'-O-methyl modified nucleotide
  modified_base 75: mod_base = OTHER; note = 2'-O-methyl modified nucleotide
  modified_base 76: mod_base = OTHER; note = 2'-O-methyl modified nucleotide
  modified_base 77: mod_base = OTHER; note = 2'-O-methyl modified nucleotide
  modified_base 78: mod_base = OTHER; note = 2'-O-methyl modified nucleotide
  modified_base 79: mod_base = OTHER; note = 2'-O-methyl modified nucleotide
  modified_base 80: mod_base = OTHER; note = 2'-O-methyl modified nucleotide
  modified_base 81: mod_base = OTHER; note = 2'-O-methyl modified nucleotide
  modified_base 82: mod_base = OTHER; note = 2'-O-methyl modified nucleotide
  modified_base 83: mod_base = OTHER; note = 2'-O-methyl modified nucleotide
  modified_base 84: mod_base = OTHER; note = 2'-O-methyl modified nucleotide
  modified_base 85: mod_base = OTHER; note = 2'-O-methyl modified nucleotide
  modified_base 86: mod_base = OTHER; note = 2'-O-methyl modified nucleotide
  modified_base 87: mod_base = OTHER; note = 2'-O-methyl modified nucleotide
  modified_base 88: mod_base = OTHER; note = 2'-O-methyl modified nucleotide
  modified_base 89: mod_base = OTHER; note = 2'-O-methyl modified nucleotide
  modified_base 90: mod_base = OTHER; note = 2'-O-methyl modified nucleotide
  modified_base 91: mod_base = OTHER; note = 2'-O-methyl modified nucleotide
  modified_base 92: mod_base = OTHER; note = 2'-O-methyl modified nucleotide
  modified_base 93: mod_base = OTHER; note = 2'-O-methyl modified nucleotide
  modified_base 94: mod_base = OTHER; note = 2'-O-methyl modified nucleotide
  modified_base 95: mod_base = OTHER; note = 2'-O-methyl modified nucleotide
  modified_base 96: mod_base = OTHER; note = 2'-O-methyl modified nucleotide
  modified_base 120: mod_base = OTHER; note = Nucleotide with phosphorothioate linkage
  modified_base 121: mod_base = OTHER; note = 2'-O-methyl modified nucleotide with phosphorothioate linkage
  modified_base 122: mod_base = OTHER; note = 2'-O-methyl modified nucleotide with phosphorothioate linkage
  modified_base 123: mod_base = OTHER; note = 2'-O-methyl modified nucleotide
gctggtacacggcagggtcagttttagagctagaaatagcaagttaaaataaggctagtccgttatcaacttgaaaaagtggcaccgagtcggtgccccacagatatccagtgaccctgccgt

SEQ ID NO: 16708 - RNA, 122 nt, synthetic construct
  source 1..122: mol_type = other RNA
  modified_base 1: mod_base = OTHER; note = 2'-O-methyl modified nucleotide with phosphorothioate linkage
  modified_base 2: mod_base = OTHER; note = 2'-O-methyl modified nucleotide with phosphorothioate linkage
  modified_base 3: mod_base = OTHER; note = 2'-O-methyl modified nucleotide with phosphorothioate linkage
  modified_base 29: mod_base = OTHER; note = 2'-O-methyl modified nucleotide
  modified_base 30: mod_base = OTHER; note = 2'-O-methyl modified nucleotide
  modified_base 31: mod_base = OTHER; note = 2'-O-methyl modified nucleotide
  modified_base 32: mod_base = OTHER; note = 2'-O-methyl modified nucleotide
  modified_base 33: mod_base = OTHER; note = 2'-O-methyl modified nucleotide
  modified_base 34: mod_base = OTHER; note = 2'-O-methyl modified nucleotide
  modified_base 35: mod_base = OTHER; note = 2'-O-methyl modified nucleotide
  modified_base 36: mod_base = OTHER; note = 2'-O-methyl modified nucleotide
  modified_base 37: mod_base = OTHER; note = 2'-O-methyl modified nucleotide
  modified_base 38: mod_base = OTHER; note = 2'-O-methyl modified nucleotide
  modified_base 39: mod_base = OTHER; note = 2'-O-methyl modified nucleotide
  modified_base 40: mod_base = OTHER; note = 2'-O-methyl modified nucleotide
  modified_base 69: mod_base = OTHER; note = 2'-O-methyl modified nucleotide
  modified_base 70: mod_base = OTHER; note = 2'-O-methyl modified nucleotide
  modified_base 71: mod_base = OTHER; note = 2'-O-methyl modified nucleotide
  modified_base 72: mod_base = OTHER; note = 2'-O-methyl modified nucleotide
  modified_base 73: mod_base = OTHER; note = 2'-O-methyl modified nucleotide
  modified_base 74: mod_base = OTHER; note = 2'-O-methyl modified nucleotide
  modified_base 75: mod_base = OTHER; note = 2'-O-methyl modified nucleotide
  modified_base 76: mod_base = OTHER; note = 2'-O-methyl modified nucleotide
  modified_base 77: mod_base = OTHER; note = 2'-O-methyl modified nucleotide
  modified_base 78: mod_base = OTHER; note = 2'-O-methyl modified nucleotide
  modified_base 79: mod_base = OTHER; note = 2'-O-methyl modified nucleotide
  modified_base 80: mod_base = OTHER; note = 2'-O-methyl modified nucleotide
  modified_base 81: mod_base = OTHER; note = 2'-O-methyl modified nucleotide
  modified_base 82: mod_base = OTHER; note = 2'-O-methyl modified nucleotide
  modified_base 83: mod_base = OTHER; note = 2'-O-methyl modified nucleotide
  modified_base 84: mod_base = OTHER; note = 2'-O-methyl modified nucleotide
  modified_base 85: mod_base = OTHER; note = 2'-O-methyl modified nucleotide
  modified_base 86: mod_base = OTHER; note = 2'-O-methyl modified nucleotide
  modified_base 87: mod_base = OTHER; note = 2'-O-methyl modified nucleotide
  modified_base 88: mod_base = OTHER; note = 2'-O-methyl modified nucleotide
  modified_base 89: mod_base = OTHER; note = 2'-O-methyl modified nucleotide
  modified_base 90: mod_base = OTHER; note = 2'-O-methyl modified nucleotide
  modified_base 91: mod_base = OTHER; note = 2'-O-methyl modified nucleotide
  modified_base 92: mod_base = OTHER; note = 2'-O-methyl modified nucleotide
  modified_base 93: mod_base = OTHER; note = 2'-O-methyl modified nucleotide
  modified_base 94: mod_base = OTHER; note = 2'-O-methyl modified nucleotide
  modified_base 95: mod_base = OTHER; note = 2'-O-methyl modified nucleotide
  modified_base 96: mod_base = OTHER; note = 2'-O-methyl modified nucleotide
  modified_base 119: mod_base = OTHER; note = Nucleotide with phosphorothioate linkage
  modified_base 120: mod_base = OTHER; note = 2'-O-methyl modified nucleotide with phosphorothioate linkage
  modified_base 121: mod_base = OTHER; note = 2'-O-methyl modified nucleotide with phosphorothioate linkage
  modified_base 122: mod_base = OTHER; note = 2'-O-methyl modified nucleotide
gctggtacacggcagggtcagttttagagctagaaatagcaagttaaaataaggctagtccgttatcaacttgaaaaagtggcaccgagtcggtgccccacagatatccagtgaccctgccg

SEQ ID NO: 16709 - RNA, 129 nt, synthetic construct
  source 1..129: mol_type = other RNA
  modified_base 1: mod_base = OTHER; note = 2'-O-methyl modified nucleotide with phosphorothioate linkage
  modified_base 2: mod_base = OTHER; note = 2'-O-methyl modified nucleotide with phosphorothioate linkage
  modified_base 3: mod_base = OTHER; note = 2'-O-methyl modified nucleotide with phosphorothioate linkage
  modified_base 29: mod_base = OTHER; note = 2'-O-methyl modified nucleotide
  modified_base 30: mod_base = OTHER; note = 2'-O-methyl modified nucleotide
  modified_base 31: mod_base = OTHER; note = 2'-O-methyl modified nucleotide
  modified_base 32: mod_base = OTHER; note = 2'-O-methyl modified nucleotide
  modified_base 33: mod_base = OTHER; note = 2'-O-methyl modified nucleotide
  modified_base 34: mod_base = OTHER; note = 2'-O-methyl modified nucleotide
  modified_base 35: mod_base = OTHER; note = 2'-O-methyl modified nucleotide
  modified_base 36: mod_base = OTHER; note = 2'-O-methyl modified nucleotide
  modified_base 37: mod_base = OTHER; note = 2'-O-methyl modified nucleotide
  modified_base 38: mod_base = OTHER; note = 2'-O-methyl modified nucleotide
  modified_base 39: mod_base = OTHER; note = 2'-O-methyl modified nucleotide
  modified_base 40: mod_base = OTHER; note = 2'-O-methyl modified nucleotide
  modified_base 69: mod_base = OTHER; note = 2'-O-methyl modified nucleotide
  modified_base 70: mod_base = OTHER; note = 2'-O-methyl modified nucleotide
  modified_base 71: mod_base = OTHER; note = 2'-O-methyl modified nucleotide
  modified_base 72: mod_base = OTHER; note = 2'-O-methyl modified nucleotide
  modified_base 73: mod_base = OTHER; note = 2'-O-methyl modified nucleotide
  modified_base 74: mod_base = OTHER; note = 2'-O-methyl modified nucleotide
  modified_base 75: mod_base = OTHER; note = 2'-O-methyl modified nucleotide
  modified_base 76: mod_base = OTHER; note = 2'-O-methyl modified nucleotide
  modified_base 77: mod_base = OTHER; note = 2'-O-methyl modified nucleotide
  modified_base 78: mod_base = OTHER; note = 2'-O-methyl modified nucleotide
  modified_base 79: mod_base = OTHER; note = 2'-O-methyl modified nucleotide
  modified_base 80: mod_base = OTHER; note = 2'-O-methyl modified nucleotide
  modified_base 81: mod_base = OTHER; note = 2'-O-methyl modified nucleotide
  modified_base 82: mod_base = OTHER; note = 2'-O-methyl modified nucleotide
  modified_base 83: mod_base = OTHER; note = 2'-O-methyl modified nucleotide
  modified_base 84: mod_base = OTHER; note = 2'-O-methyl modified nucleotide
  modified_base 85: mod_base = OTHER; note = 2'-O-methyl modified nucleotide
  modified_base 86: mod_base = OTHER; note = 2'-O-methyl modified nucleotide
  modified_base 87: mod_base = OTHER; note = 2'-O-methyl modified nucleotide
  modified_base 88: mod_base = OTHER; note = 2'-O-methyl modified nucleotide
  modified_base 89: mod_base = OTHER; note = 2'-O-methyl modified nucleotide
  modified_base 90: mod_base = OTHER; note = 2'-O-methyl modified nucleotide
  modified_base 91: mod_base = OTHER; note = 2'-O-methyl modified nucleotide
  modified_base 92: mod_base = OTHER; note = 2'-O-methyl modified nucleotide
  modified_base 93: mod_base = OTHER; note = 2'-O-methyl modified nucleotide
  modified_base 94: mod_base = OTHER; note = 2'-O-methyl modified nucleotide
  modified_base 95: mod_base = OTHER; note = 2'-O-methyl modified nucleotide
  modified_base 96: mod_base = OTHER; note = 2'-O-methyl modified nucleotide
  modified_base 126: mod_base = OTHER; note = Nucleotide with phosphorothioate linkage
  modified_base 127: mod_base = OTHER; note = 2'-O-methyl modified nucleotide with phosphorothioate linkage
  modified_base 128: mod_base = OTHER; note = 2'-O-methyl modified nucleotide with phosphorothioate linkage
  modified_base 129: mod_base = OTHER; note = 2'-O-methyl modified nucleotide
gctggtacacggcagggtcagttttagagctagaaatagcaagttaaaataaggctagtccgttatcaacttgaaaaagtggcaccgagtcggtgcgtcccacagatatccagtgaccctgccgtgtac

SEQ ID NO: 16710 - RNA, 128 nt, synthetic construct
  source 1..128: mol_type = other RNA
  modified_base 1: mod_base = OTHER; note = 2'-O-methyl modified nucleotide with phosphorothioate linkage
  modified_base 2: mod_base = OTHER; note = 2'-O-methyl modified nucleotide with phosphorothioate linkage
  modified_base 3: mod_base = OTHER; note = 2'-O-methyl modified nucleotide with phosphorothioate linkage
  modified_base 29: mod_base = OTHER; note = 2'-O-methyl modified nucleotide
  modified_base 30: mod_base = OTHER; note = 2'-O-methyl modified nucleotide
  modified_base 31: mod_base = OTHER; note = 2'-O-methyl modified nucleotide
  modified_base 32: mod_base = OTHER; note = 2'-O-methyl modified nucleotide
  modified_base 33: mod_base = OTHER; note = 2'-O-methyl modified nucleotide
  modified_base 34: mod_base = OTHER; note = 2'-O-methyl modified nucleotide
  modified_base 35: mod_base = OTHER; note = 2'-O-methyl modified nucleotide
  modified_base 36: mod_base = OTHER; note = 2'-O-methyl modified nucleotide
  modified_base 37: mod_base = OTHER; note = 2'-O-methyl modified nucleotide
  modified_base 38: mod_base = OTHER; note = 2'-O-methyl modified nucleotide
  modified_base 39: mod_base = OTHER; note = 2'-O-methyl modified nucleotide
  modified_base 40: mod_base = OTHER; note = 2'-O-methyl modified nucleotide
  modified_base 69: mod_base = OTHER; note = 2'-O-methyl modified nucleotide
  modified_base 70: mod_base = OTHER; note = 2'-O-methyl modified nucleotide
  modified_base 71: mod_base = OTHER; note = 2'-O-methyl modified nucleotide
  modified_base 72: mod_base = OTHER; note = 2'-O-methyl modified nucleotide
  modified_base 73: mod_base = OTHER; note = 2'-O-methyl modified nucleotide
  modified_base 74: mod_base = OTHER; note = 2'-O-methyl modified nucleotide
  modified_base 75: mod_base = OTHER; note = 2'-O-methyl modified nucleotide
  modified_base 76: mod_base = OTHER; note = 2'-O-methyl modified nucleotide
  modified_base 77: mod_base = OTHER; note = 2'-O-methyl modified nucleotide
  modified_base 78: mod_base = OTHER; note = 2'-O-methyl modified nucleotide
  modified_base 79: mod_base = OTHER; note = 2'-O-methyl modified nucleotide
  modified_base 80: mod_base = OTHER; note = 2'-O-methyl modified nucleotide
  modified_base 81: mod_base = OTHER; note = 2'-O-methyl modified nucleotide
  modified_base 82: mod_base = OTHER; note = 2'-O-methyl modified nucleotide
  modified_base 83: mod_base = OTHER; note = 2'-O-methyl modified nucleotide
  modified_base 84: mod_base = OTHER; note = 2'-O-methyl modified nucleotide
  modified_base 85: mod_base = OTHER; note = 2'-O-methyl modified nucleotide
  modified_base 86: mod_base = OTHER; note = 2'-O-methyl modified nucleotide
  modified_base 87: mod_base = OTHER; note = 2'-O-methyl modified nucleotide
  modified_base 88: mod_base = OTHER; note = 2'-O-methyl modified nucleotide
  modified_base 89: mod_base = OTHER; note = 2'-O-methyl modified nucleotide
  modified_base 90: mod_base = OTHER; note = 2'-O-methyl modified nucleotide
  modified_base 91: mod_base = OTHER; note = 2'-O-methyl modified nucleotide
  modified_base 92: mod_base = OTHER; note = 2'-O-methyl modified nucleotide
  modified_base 93: mod_base = OTHER; note = 2'-O-methyl modified nucleotide
  modified_base 94: mod_base = OTHER; note = 2'-O-methyl modified nucleotide
  modified_base 95: mod_base = OTHER; note = 2'-O-methyl modified nucleotide
  modified_base 96: mod_base = OTHER; note = 2'-O-methyl modified nucleotide
  modified_base 125: mod_base = OTHER; note = Nucleotide with phosphorothioate linkage
  modified_base 126: mod_base = OTHER; note = 2'-O-methyl modified nucleotide with phosphorothioate linkage
  modified_base 127: mod_base = OTHER; note = 2'-O-methyl modified nucleotide with phosphorothioate linkage
  modified_base 128: mod_base = OTHER; note = 2'-O-methyl modified nucleotide
gctggtacacggcagggtcagttttagagctagaaatagcaagttaaaataaggctagtccgttatcaacttgaaaaagtggcaccgagtcggtgcgtcccacagatatccagtgaccctgccgtgta

SEQ ID NO: 16711 - RNA, 127 nt, synthetic construct
  source 1..127: mol_type = other RNA
  modified_base 1: mod_base = OTHER; note = 2'-O-methyl modified nucleotide with phosphorothioate linkage
  modified_base 2: mod_base = OTHER; note = 2'-O-methyl modified nucleotide with phosphorothioate linkage
  modified_base 3: mod_base = OTHER; note = 2'-O-methyl modified nucleotide with phosphorothioate linkage
  modified_base 29: mod_base = OTHER; note = 2'-O-methyl modified nucleotide
  modified_base 30: mod_base = OTHER; note = 2'-O-methyl modified nucleotide
  modified_base 31: mod_base = OTHER; note = 2'-O-methyl modified nucleotide
  modified_base 32: mod_base = OTHER; note = 2'-O-methyl modified nucleotide
  modified_base 33: mod_base = OTHER; note = 2'-O-methyl modified nucleotide
  modified_base 34: mod_base = OTHER; note = 2'-O-methyl modified nucleotide
  modified_base 35: mod_base = OTHER; note = 2'-O-methyl modified nucleotide
  modified_base 36: mod_base = OTHER; note = 2'-O-methyl modified nucleotide
  modified_base 37: mod_base = OTHER; note = 2'-O-methyl modified nucleotide
  modified_base 38: mod_base = OTHER; note = 2'-O-methyl modified nucleotide
  modified_base 39: mod_base = OTHER; note = 2'-O-methyl modified nucleotide
  modified_base 40: mod_base = OTHER; note = 2'-O-methyl modified nucleotide
  modified_base 69: mod_base = OTHER; note = 2'-O-methyl modified nucleotide
  modified_base 70: mod_base = OTHER; note = 2'-O-methyl modified nucleotide
  modified_base 71: mod_base = OTHER; note = 2'-O-methyl modified nucleotide
  modified_base 72: mod_base = OTHER; note = 2'-O-methyl modified nucleotide
  modified_base 73: mod_base = OTHER; note = 2'-O-methyl modified nucleotide
  modified_base 74: mod_base = OTHER; note = 2'-O-methyl modified nucleotide
  modified_base 75: mod_base = OTHER; note = 2'-O-methyl modified nucleotide
  modified_base 76: mod_base = OTHER; note = 2'-O-methyl modified nucleotide
  modified_base 77: mod_base = OTHER; note = 2'-O-methyl modified nucleotide
  modified_base 78: mod_base = OTHER; note = 2'-O-methyl modified nucleotide
  modified_base 79: mod_base = OTHER; note = 2'-O-methyl modified nucleotide
  modified_base 80: mod_base = OTHER; note = 2'-O-methyl modified nucleotide
  modified_base 81: mod_base = OTHER; note = 2'-O-methyl modified nucleotide
  modified_base 82: mod_base = OTHER; note = 2'-O-methyl modified nucleotide
  modified_base 83: mod_base = OTHER; note = 2'-O-methyl modified nucleotide
  modified_base 84: mod_base = OTHER; note = 2'-O-methyl modified nucleotide
  modified_base 85: mod_base = OTHER; note = 2'-O-methyl modified nucleotide
  modified_base 86: mod_base = OTHER; note = 2'-O-methyl modified nucleotide
  modified_base 87: mod_base = OTHER; note = 2'-O-methyl modified nucleotide
  modified_base 88: mod_base = OTHER; note = 2'-O-methyl modified nucleotide
  modified_base 89: mod_base = OTHER; note = 2'-O-methyl modified nucleotide
  modified_base 90: mod_base = OTHER; note = 2'-O-methyl modified nucleotide
  modified_base 91: mod_base = OTHER; note = 2'-O-methyl modified nucleotide
  modified_base 92: mod_base = OTHER; note = 2'-O-methyl modified nucleotide
  modified_base 93: mod_base = OTHER; note = 2'-O-methyl modified nucleotide
  modified_base 94: mod_base = OTHER; note = 2'-O-methyl modified nucleotide
  modified_base 95: mod_base = OTHER; note = 2'-O-methyl modified nucleotide
  modified_base 96: mod_base = OTHER; note = 2'-O-methyl modified nucleotide
  modified_base 124: mod_base = OTHER; note = Nucleotide with phosphorothioate linkage
  modified_base 125: mod_base = OTHER; note = 2'-O-methyl modified nucleotide with phosphorothioate linkage
  modified_base 126: mod_base = OTHER; note = 2'-O-methyl modified nucleotide with phosphorothioate linkage
  modified_base 127: mod_base = OTHER; note = 2'-O-methyl modified nucleotide
gctggtacacggcagggtcagttttagagctagaaatagcaagttaaaataaggctagtccgttatcaacttgaaaaagtggcaccgagtcggtgcgtcccacagatatccagtgaccctgccgtgt

SEQ ID NO: 16712 - RNA, 126 nt, synthetic construct
  source 1..126: mol_type = other RNA
  modified_base 1: mod_base = OTHER; note = 2'-O-methyl modified nucleotide with phosphorothioate linkage
  modified_base 2: mod_base = OTHER; note = 2'-O-methyl modified nucleotide with phosphorothioate linkage
  modified_base 3: mod_base = OTHER; note = 2'-O-methyl modified nucleotide with phosphorothioate linkage
  modified_base 29: mod_base = OTHER; note = 2'-O-methyl modified nucleotide
  modified_base 30: mod_base = OTHER; note = 2'-O-methyl modified nucleotide
  modified_base 31: mod_base = OTHER; note = 2'-O-methyl modified nucleotide
  modified_base 32: mod_base = OTHER; note = 2'-O-methyl modified nucleotide
  modified_base 33: mod_base = OTHER; note = 2'-O-methyl modified nucleotide
  modified_base 34: mod_base = OTHER; note = 2'-O-methyl modified nucleotide
  modified_base 35: mod_base = OTHER; note = 2'-O-methyl modified nucleotide
  modified_base 36: mod_base = OTHER; note = 2'-O-methyl modified nucleotide
  modified_base 37: mod_base = OTHER; note = 2'-O-methyl modified nucleotide
  modified_base 38: mod_base = OTHER; note = 2'-O-methyl modified nucleotide
  modified_base 39: mod_base = OTHER; note = 2'-O-methyl modified nucleotide
  modified_base 40: mod_base = OTHER; note = 2'-O-methyl modified nucleotide
  modified_base 69: mod_base = OTHER; note = 2'-O-methyl modified nucleotide
  modified_base 70: mod_base = OTHER; note = 2'-O-methyl modified nucleotide
  modified_base 71: mod_base = OTHER; note = 2'-O-methyl modified nucleotide
  modified_base 72: mod_base = OTHER; note = 2'-O-methyl modified nucleotide
  modified_base 73: mod_base = OTHER; note = 2'-O-methyl modified nucleotide
  modified_base 74: mod_base = OTHER; note = 2'-O-methyl modified nucleotide
  modified_base 75: mod_base = OTHER; note = 2'-O-methyl modified nucleotide
  modified_base 76: mod_base = OTHER; note = 2'-O-methyl modified nucleotide
  modified_base 77: mod_base = OTHER; note = 2'-O-methyl modified nucleotide
  modified_base 78: mod_base = OTHER; note = 2'-O-methyl modified nucleotide
  modified_base 79: mod_base = OTHER; note = 2'-O-methyl modified nucleotide
  modified_base 80: mod_base = OTHER; note = 2'-O-methyl modified nucleotide
  modified_base 81: mod_base = OTHER; note = 2'-O-methyl modified nucleotide
  modified_base 82: mod_base = OTHER; note = 2'-O-methyl modified nucleotide
  modified_base 83: mod_base = OTHER; note = 2'-O-methyl modified nucleotide
  modified_base 84: mod_base = OTHER; note = 2'-O-methyl modified nucleotide
  modified_base 85: mod_base = OTHER; note = 2'-O-methyl modified nucleotide
  modified_base 86: mod_base = OTHER; note = 2'-O-methyl modified nucleotide
  modified_base 87: mod_base = OTHER; note = 2'-O-methyl modified nucleotide
  modified_base 88: mod_base = OTHER; note = 2'-O-methyl modified nucleotide
  modified_base 89: mod_base = OTHER; note = 2'-O-methyl modified nucleotide
  modified_base 90: mod_base = OTHER; note = 2'-O-methyl modified nucleotide
  modified_base 91: mod_base = OTHER; note = 2'-O-methyl modified nucleotide
  modified_base 92: mod_base = OTHER; note = 2'-O-methyl modified nucleotide
  modified_base 93: mod_base = OTHER; note = 2'-O-methyl modified nucleotide
  modified_base 94: mod_base = OTHER; note = 2'-O-methyl modified nucleotide
  modified_base 95: mod_base = OTHER; note = 2'-O-methyl modified nucleotide
  modified_base 96: mod_base = OTHER; note = 2'-O-methyl modified nucleotide
  modified_base 123: mod_base = OTHER; note = Nucleotide with phosphorothioate linkage
  modified_base 124: mod_base = OTHER; note = 2'-O-methyl modified nucleotide with phosphorothioate linkage
  modified_base 125: mod_base = OTHER; note = 2'-O-methyl modified nucleotide with phosphorothioate linkage
  modified_base 126: mod_base = OTHER; note = 2'-O-methyl modified nucleotide
gctggtacacggcagggtcagttttagagctagaaatagcaagttaaaataaggctagtccgttatcaacttgaaaaagtggcaccgagtcggtgcgtcccacagatatccagtgaccctgccgtg

SEQ ID NO: 16713 - RNA, 125 nt, synthetic construct
  source 1..125: mol_type = other RNA
  modified_base 1: mod_base = OTHER; note = 2'-O-methyl modified nucleotide with phosphorothioate linkage
  modified_base 2: mod_base = OTHER; note = 2'-O-methyl modified nucleotide with phosphorothioate linkage
  modified_base 3: mod_base = OTHER; note = 2'-O-methyl modified nucleotide with phosphorothioate linkage
  modified_base 29: mod_base = OTHER; note = 2'-O-methyl modified nucleotide
  modified_base 30: mod_base = OTHER; note = 2'-O-methyl modified nucleotide
  modified_base 31: mod_base = OTHER; note = 2'-O-methyl modified nucleotide
  modified_base 32: mod_base = OTHER; note = 2'-O-methyl modified nucleotide
  modified_base 33: mod_base = OTHER; note = 2'-O-methyl modified nucleotide
  modified_base 34: mod_base = OTHER; note = 2'-O-methyl modified nucleotide
  modified_base 35: mod_base = OTHER; note = 2'-O-methyl modified nucleotide
  modified_base 36: mod_base = OTHER; note = 2'-O-methyl modified nucleotide
  modified_base 37: mod_base = OTHER; note = 2'-O-methyl modified nucleotide
  modified_base 38: mod_base = OTHER; note = 2'-O-methyl modified nucleotide
  modified_base 39: mod_base = OTHER; note = 2'-O-methyl modified nucleotide
  modified_base 40: mod_base = OTHER; note = 2'-O-methyl modified nucleotide
  modified_base 69: mod_base = OTHER; note = 2'-O-methyl modified nucleotide
  modified_base 70: mod_base = OTHER; note = 2'-O-methyl modified nucleotide
  modified_base 71: mod_base = OTHER; note = 2'-O-methyl modified nucleotide
  modified_base 72: mod_base = OTHER; note = 2'-O-methyl modified nucleotide
  modified_base 73: mod_base = OTHER; note = 2'-O-methyl modified nucleotide
  modified_base 74: mod_base = OTHER; note = 2'-O-methyl modified nucleotide
  modified_base 75: mod_base = OTHER; note = 2'-O-methyl modified nucleotide
  modified_base 76: mod_base = OTHER; note = 2'-O-methyl modified nucleotide
  modified_base 77: mod_base = OTHER; note = 2'-O-methyl modified nucleotide
  modified_base 78: mod_base = OTHER; note = 2'-O-methyl modified nucleotide
  modified_base 79: mod_base = OTHER; note = 2'-O-methyl modified nucleotide
  modified_base 80: mod_base = OTHER; note = 2'-O-methyl modified nucleotide
  modified_base 81: mod_base = OTHER; note = 2'-O-methyl modified nucleotide
  modified_base 82: mod_base = OTHER; note = 2'-O-methyl modified nucleotide
  modified_base 83: mod_base = OTHER; note = 2'-O-methyl modified nucleotide
  modified_base 84: mod_base = OTHER; note = 2'-O-methyl modified nucleotide
  modified_base 85: mod_base = OTHER; note = 2'-O-methyl modified nucleotide
  modified_base 86: mod_base = OTHER; note = 2'-O-methyl modified nucleotide
  modified_base 87: mod_base = OTHER; note = 2'-O-methyl modified nucleotide
  modified_base 88: mod_base = OTHER; note = 2'-O-methyl modified nucleotide
  modified_base 89: mod_base = OTHER; note = 2'-O-methyl modified nucleotide
  modified_base 90: mod_base = OTHER; note = 2'-O-methyl modified nucleotide
  modified_base 91: mod_base = OTHER; note = 2'-O-methyl modified nucleotide
  modified_base 92: mod_base = OTHER; note = 2'-O-methyl modified nucleotide
  modified_base 93: mod_base = OTHER; note = 2'-O-methyl modified nucleotide
  modified_base 94: mod_base = OTHER; note = 2'-O-methyl modified nucleotide
  modified_base 95: mod_base = OTHER; note = 2'-O-methyl modified nucleotide
  modified_base 96: mod_base = OTHER; note = 2'-O-methyl modified nucleotide
  modified_base 122: mod_base = OTHER; note = Nucleotide with phosphorothioate linkage
  modified_base 123: mod_base = OTHER; note = 2'-O-methyl modified nucleotide with phosphorothioate linkage
  modified_base 124: mod_base = OTHER; note = 2'-O-methyl modified nucleotide with phosphorothioate linkage
  modified_base 125: mod_base = OTHER; note = 2'-O-methyl modified nucleotide
gctggtacacggcagggtcagttttagagctagaaatagcaagttaaaataaggctagtccgttatcaacttgaaaaagtggcaccgagtcggtgcgtcccacagatatccagtgaccctgccgt

SEQ ID NO: 16714 - RNA, 124 nt, synthetic construct
  source 1..124: mol_type = other RNA
  modified_base 1: mod_base = OTHER; note = 2'-O-methyl modified nucleotide with phosphorothioate linkage
  modified_base 2: mod_base = OTHER; note = 2'-O-methyl modified nucleotide with phosphorothioate linkage
  modified_base 3: mod_base = OTHER; note = 2'-O-methyl modified nucleotide with phosphorothioate linkage
  modified_base 29: mod_base = OTHER; note = 2'-O-methyl modified nucleotide
  modified_base 30: mod_base = OTHER; note = 2'-O-methyl modified nucleotide
  modified_base 31: mod_base = OTHER; note = 2'-O-methyl modified nucleotide
  modified_base 32: mod_base = OTHER; note = 2'-O-methyl modified nucleotide
  modified_base 33: mod_base = OTHER; note = 2'-O-methyl modified nucleotide
  modified_base 34: mod_base = OTHER; note = 2'-O-methyl modified nucleotide
  modified_base 35: mod_base = OTHER; note = 2'-O-methyl modified nucleotide
  modified_base 36: mod_base = OTHER; note = 2'-O-methyl modified nucleotide
  modified_base 37: mod_base = OTHER; note = 2'-O-methyl modified nucleotide
  modified_base 38: mod_base = OTHER; note = 2'-O-methyl modified nucleotide
  modified_base 39: mod_base = OTHER; note = 2'-O-methyl modified nucleotide
  modified_base 40: mod_base = OTHER; note = 2'-O-methyl modified nucleotide
  modified_base 69: mod_base = OTHER; note = 2'-O-methyl modified nucleotide
  modified_base 70: mod_base = OTHER; note = 2'-O-methyl modified nucleotide
  modified_base 71: mod_base = OTHER; note = 2'-O-methyl modified nucleotide
  modified_base 72: mod_base = OTHER; note = 2'-O-methyl modified nucleotide
  modified_base 73: mod_base = OTHER; note = 2'-O-methyl modified nucleotide
  modified_base 74: mod_base = OTHER; note = 2'-O-methyl modified nucleotide
  modified_base 75: mod_base = OTHER; note = 2'-O-methyl modified nucleotide
  modified_base 76: mod_base = OTHER; note = 2'-O-methyl modified nucleotide
  modified_base 77: mod_base = OTHER; note = 2'-O-methyl modified nucleotide
  modified_base 78: mod_base = OTHER; note = 2'-O-methyl modified nucleotide
  modified_base 79: mod_base = OTHER; note = 2'-O-methyl modified nucleotide
  modified_base 80: mod_base = OTHER; note = 2'-O-methyl modified nucleotide
  modified_base 81: mod_base = OTHER; note = 2'-O-methyl modified nucleotide
  modified_base 82: mod_base = OTHER; note = 2'-O-methyl modified nucleotide
  modified_base 83: mod_base = OTHER; note = 2'-O-methyl modified nucleotide
  modified_base 84: mod_base = OTHER; note = 2'-O-methyl modified nucleotide
  modified_base 85: mod_base = OTHER; note = 2'-O-methyl modified nucleotide
  modified_base 86: mod_base = OTHER; note = 2'-O-methyl modified nucleotide
  modified_base 87: mod_base = OTHER; note = 2'-O-methyl modified nucleotide
  modified_base 88: mod_base = OTHER; note = 2'-O-methyl modified nucleotide
  modified_base 89: mod_base = OTHER; note = 2'-O-methyl modified nucleotide
  modified_base 90: mod_base = OTHER; note = 2'-O-methyl modified nucleotide
  modified_base 91: mod_base = OTHER; note = 2'-O-methyl modified nucleotide
  modified_base 92: mod_base = OTHER; note = 2'-O-methyl modified nucleotide
  modified_base 93: mod_base = OTHER; note = 2'-O-methyl modified nucleotide
  modified_base 94: mod_base = OTHER; note = 2'-O-methyl modified nucleotide
  modified_base 95: mod_base = OTHER; note = 2'-O-methyl modified nucleotide
  modified_base 96: mod_base = OTHER; note = 2'-O-methyl modified nucleotide
  modified_base 121: mod_base = OTHER; note = Nucleotide with phosphorothioate linkage
  modified_base 122: mod_base = OTHER; note = 2'-O-methyl modified nucleotide with phosphorothioate linkage
  modified_base 123: mod_base = OTHER; note = 2'-O-methyl modified nucleotide with phosphorothioate linkage
  modified_base 124: mod_base = OTHER; note = 2'-O-methyl modified nucleotide
gctggtacacggcagggtcagttttagagctagaaatagcaagttaaaataaggctagtccgttatcaacttgaaaaagtggcaccgagtcggtgcgtcccacagatatccagtgaccctgccg

SEQ ID NO: 16715 - RNA, 117 nt, synthetic construct
  source 1..117: mol_type = other RNA
  modified_base 1: mod_base = OTHER; note = 2'-O-methyl modified nucleotide with phosphorothioate linkage
  modified_base 2: mod_base = OTHER; note = 2'-O-methyl modified nucleotide with phosphorothioate linkage
  modified_base 3: mod_base = OTHER; note = 2'-O-methyl modified nucleotide with phosphorothioate linkage
  modified_base 29: mod_base = OTHER; note = 2'-O-methyl modified nucleotide
  modified_base 30: mod_base = OTHER; note = 2'-O-methyl modified nucleotide
  modified_base 31: mod_base = OTHER; note = 2'-O-methyl modified nucleotide
  modified_base 32: mod_base = OTHER; note = 2'-O-methyl modified nucleotide
  modified_base 33: mod_base = OTHER; note = 2'-O-methyl modified nucleotide
  modified_base 34: mod_base = OTHER; note = 2'-O-methyl modified nucleotide
  modified_base 35: mod_base = OTHER; note = 2'-O-methyl modified nucleotide
  modified_base 36: mod_base = OTHER; note = 2'-O-methyl modified nucleotide
  modified_base 37: mod_base = OTHER; note = 2'-O-methyl modified nucleotide
  modified_base 38: mod_base = OTHER; note = 2'-O-methyl modified nucleotide
  modified_base 39: mod_base = OTHER; note = 2'-O-methyl modified nucleotide
  modified_base 40: mod_base = OTHER; note = 2'-O-methyl modified nucleotide
  modified_base 69: mod_base = OTHER; note = 2'-O-methyl modified nucleotide
  modified_base 70: mod_base = OTHER; note = 2'-O-methyl modified nucleotide
  modified_base 71: mod_base = OTHER; note = 2'-O-methyl modified nucleotide
  modified_base 72: mod_base = OTHER; note = 2'-O-methyl modified nucleotide
  modified_base 73: mod_base = OTHER; note = 2'-O-methyl modified nucleotide
  modified_base 74: mod_base = OTHER; note = 2'-O-methyl modified nucleotide
  modified_base 75: mod_base = OTHER; note = 2'-O-methyl modified nucleotide
  modified_base 76: mod_base = OTHER; note = 2'-O-methyl modified nucleotide
  modified_base 77: mod_base = OTHER; note = 2'-O-methyl modified nucleotide
  modified_base 78: mod_base = OTHER; note = 2'-O-methyl modified nucleotide
  modified_base 79: mod_base = OTHER; note = 2'-O-methyl modified nucleotide
  modified_base 80: mod_base = OTHER; note = 2'-O-methyl modified nucleotide
  modified_base 81: mod_base = OTHER; note = 2'-O-methyl modified nucleotide
  modified_base 82: mod_base = OTHER; note = 2'-O-methyl modified nucleotide
  modified_base 83: mod_base = OTHER; note = 2'-O-methyl modified nucleotide
  modified_base 84: mod_base = OTHER; note = 2'-O-methyl modified nucleotide
  modified_base 85: mod_base = OTHER; note = 2'-O-methyl modified nucleotide
  modified_base 86: mod_base = OTHER; note = 2'-O-methyl modified nucleotide
  modified_base 87: mod_base = OTHER; note = 2'-O-methyl modified nucleotide
  modified_base 88: mod_base = OTHER; note = 2'-O-methyl modified nucleotide
  modified_base 89: mod_base = OTHER; note = 2'-O-methyl modified nucleotide
  modified_base 90: mod_base = OTHER; note = 2'-O-methyl modified nucleotide
  modified_base 91: mod_base = OTHER; note = 2'-O-methyl modified nucleotide
  modified_base 92: mod_base = OTHER; note = 2'-O-methyl modified nucleotide
  modified_base 93: mod_base = OTHER; note = 2'-O-methyl modified nucleotide
  modified_base 94: mod_base = OTHER; note = 2'-O-methyl modified nucleotide
  modified_base 95: mod_base = OTHER; note = 2'-O-methyl modified nucleotide
  modified_base 96: mod_base = OTHER; note = 2'-O-methyl modified nucleotide
  modified_base 114: mod_base = OTHER; note = Nucleotide with phosphorothioate linkage
  modified_base 115: mod_base = OTHER; note = 2'-O-methyl modified nucleotide with phosphorothioate linkage
  modified_base 116: mod_base = OTHER; note = 2'-O-methyl modified nucleotide with phosphorothioate linkage
  modified_base 117: mod_base = OTHER; note = 2'-O-methyl modified nucleotide
gctggtacacggcagggtcagttttagagctagaaatagcaagttaaaataaggctagtccgttatcaacttgaaaaagtggcaccgagtcggtgctatcctgaccctgccgtgtac

SEQ ID NO: 16716 - RNA, 116 nt, synthetic construct
  source 1..116: mol_type = other RNA
  modified_base 1: mod_base = OTHER; note = 2'-O-methyl modified nucleotide with phosphorothioate linkage
  modified_base 2: mod_base = OTHER; note = 2'-O-methyl modified nucleotide with phosphorothioate linkage
  modified_base 3: mod_base = OTHER; note = 2'-O-methyl modified nucleotide with phosphorothioate linkage
  modified_base 29: mod_base = OTHER; note = 2'-O-methyl modified nucleotide
  modified_base 30: mod_base = OTHER; note = 2'-O-methyl modified nucleotide
  modified_base 31: mod_base = OTHER; note = 2'-O-methyl modified nucleotide
  modified_base 32: mod_base = OTHER; note = 2'-O-methyl modified nucleotide
  modified_base 33: mod_base = OTHER; note = 2'-O-methyl modified nucleotide
  modified_base 34: mod_base = OTHER; note = 2'-O-methyl modified nucleotide
  modified_base 35: mod_base = OTHER; note = 2'-O-methyl modified nucleotide
  modified_base 36: mod_base = OTHER; note = 2'-O-methyl modified nucleotide
  modified_base 37: mod_base = OTHER; note = 2'-O-methyl modified nucleotide
  modified_base 38: mod_base = OTHER; note = 2'-O-methyl modified nucleotide
  modified_base 39: mod_base = OTHER; note = 2'-O-methyl modified nucleotide
  modified_base 40: mod_base = OTHER; note = 2'-O-methyl modified nucleotide
  modified_base 69: mod_base = OTHER; note = 2'-O-methyl modified nucleotide
  modified_base 70: mod_base = OTHER; note = 2'-O-methyl modified nucleotide
  modified_base 71: mod_base = OTHER; note = 2'-O-methyl modified nucleotide
  modified_base 72: mod_base = OTHER; note = 2'-O-methyl modified nucleotide
  modified_base 73: mod_base = OTHER; note = 2'-O-methyl modified nucleotide
  modified_base 74: mod_base = OTHER; note = 2'-O-methyl modified nucleotide
  modified_base 75: mod_base = OTHER; note = 2'-O-methyl modified nucleotide
  modified_base 76: mod_base = OTHER; note = 2'-O-methyl modified nucleotide
  modified_base 77: mod_base = OTHER; note = 2'-O-methyl modified nucleotide
  modified_base 78: mod_base = OTHER; note = 2'-O-methyl modified nucleotide
  modified_base 79: mod_base = OTHER; note = 2'-O-methyl modified nucleotide
  modified_base 80: mod_base = OTHER; note = 2'-O-methyl modified nucleotide
  modified_base 81: mod_base = OTHER; note = 2'-O-methyl modified nucleotide
  modified_base 82: mod_base = OTHER; note = 2'-O-methyl modified nucleotide
  modified_base 83: mod_base = OTHER; note = 2'-O-methyl modified nucleotide
  modified_base 84: mod_base = OTHER; note = 2'-O-methyl modified nucleotide
  modified_base 85: mod_base = OTHER; note = 2'-O-methyl modified nucleotide
  modified_base 86: mod_base = OTHER; note = 2'-O-methyl modified nucleotide
  modified_base 87: mod_base = OTHER; note = 2'-O-methyl modified nucleotide
  modified_base 88: mod_base = OTHER; note = 2'-O-methyl modified nucleotide
  modified_base 89: mod_base = OTHER; note = 2'-O-methyl modified nucleotide
  modified_base 90: mod_base = OTHER; note = 2'-O-methyl modified nucleotide
  modified_base 91: mod_base = OTHER; note = 2'-O-methyl modified nucleotide
  modified_base 92: mod_base = OTHER; note = 2'-O-methyl modified nucleotide
  modified_base 93: mod_base = OTHER; note = 2'-O-methyl modified nucleotide
  modified_base 94: mod_base = OTHER; note = 2'-O-methyl modified nucleotide
  modified_base 95: mod_base = OTHER; note = 2'-O-methyl modified nucleotide
  modified_base 96: mod_base = OTHER; note = 2'-O-methyl modified nucleotide
  modified_base 113: mod_base = OTHER; note = Nucleotide with phosphorothioate linkage
  modified_base 114: mod_base = OTHER; note = 2'-O-methyl modified nucleotide with phosphorothioate linkage
  modified_base 115: mod_base = OTHER; note = 2'-O-methyl modified nucleotide with phosphorothioate linkage
  modified_base 116: mod_base = OTHER; note = 2'-O-methyl modified nucleotide
gctggtacacggcagggtcagttttagagctagaaatagcaagttaaaataaggctagtccgttatcaacttgaaaaagtggcaccgagtcggtgctatcctgaccctgccgtgta

SEQ ID NO: 16717 - RNA, 115 nt, synthetic construct
  source 1..115: mol_type = other RNA
  modified_base 1: mod_base = OTHER; note = 2'-O-methyl modified nucleotide with phosphorothioate linkage
  modified_base 2: mod_base = OTHER; note = 2'-O-methyl modified nucleotide with phosphorothioate linkage
  modified_base 3: mod_base = OTHER; note = 2'-O-methyl modified nucleotide with phosphorothioate linkage
  modified_base 29: mod_base = OTHER; note = 2'-O-methyl modified nucleotide
  modified_base 30: mod_base = OTHER; note = 2'-O-methyl modified nucleotide
  modified_base 31: mod_base = OTHER; note = 2'-O-methyl modified nucleotide
  modified_base 32: mod_base = OTHER; note = 2'-O-methyl modified nucleotide
  modified_base 33: mod_base = OTHER; note = 2'-O-methyl modified nucleotide
  modified_base 34: mod_base = OTHER; note = 2'-O-methyl modified nucleotide
  modified_base 35: mod_base = OTHER; note = 2'-O-methyl modified nucleotide
  modified_base 36: mod_base = OTHER; note = 2'-O-methyl modified nucleotide
  modified_base 37: mod_base = OTHER; note = 2'-O-methyl modified nucleotide
  modified_base 38: mod_base = OTHER; note = 2'-O-methyl modified nucleotide
  modified_base 39: mod_base = OTHER; note = 2'-O-methyl modified nucleotide
  modified_base 40: mod_base = OTHER; note = 2'-O-methyl modified nucleotide
  modified_base 69: mod_base = OTHER; note = 2'-O-methyl modified nucleotide
  modified_base 70: mod_base = OTHER; note = 2'-O-methyl modified nucleotide
  modified_base 71: mod_base = OTHER; note = 2'-O-methyl modified nucleotide
  modified_base 72: mod_base = OTHER; note = 2'-O-methyl modified nucleotide
  modified_base 73: mod_base = OTHER; note = 2'-O-methyl modified nucleotide
  modified_base 74: mod_base = OTHER; note = 2'-O-methyl modified nucleotide
  modified_base 75: mod_base = OTHER; note = 2'-O-methyl modified nucleotide
  modified_base 76: mod_base = OTHER; note = 2'-O-methyl modified nucleotide
  modified_base 77: mod_base = OTHER; note = 2'-O-methyl modified nucleotide
  modified_base 78: mod_base = OTHER; note = 2'-O-methyl modified nucleotide
  modified_base 79: mod_base = OTHER; note = 2'-O-methyl modified nucleotide
  modified_base 80: mod_base = OTHER; note = 2'-O-methyl modified nucleotide
  modified_base 81: mod_base = OTHER; note = 2'-O-methyl modified nucleotide
  modified_base 82: mod_base = OTHER; note = 2'-O-methyl modified nucleotide
  modified_base 83: mod_base = OTHER; note = 2'-O-methyl modified nucleotide
  modified_base 84: mod_base = OTHER; note = 2'-O-methyl modified nucleotide
  modified_base 85: mod_base = OTHER; note = 2'-O-methyl modified nucleotide
  modified_base 86: mod_base = OTHER; note = 2'-O-methyl modified nucleotide
  modified_base 87: mod_base = OTHER; note = 2'-O-methyl modified nucleotide
  modified_base 88: mod_base = OTHER; note = 2'-O-methyl modified nucleotide
  modified_base 89: mod_base = OTHER; note = 2'-O-methyl modified nucleotide
  modified_base 90: mod_base = OTHER; note = 2'-O-methyl modified nucleotide
  modified_base 91: mod_base = OTHER; note = 2'-O-methyl modified nucleotide
  modified_base 92: mod_base = OTHER; note = 2'-O-methyl modified nucleotide
  modified_base 93: mod_base = OTHER; note = 2'-O-methyl modified nucleotide
  modified_base 94: mod_base = OTHER; note = 2'-O-methyl modified nucleotide
  modified_base 95: mod_base = OTHER; note = 2'-O-methyl modified nucleotide
  modified_base 96: mod_base = OTHER; note = 2'-O-methyl modified nucleotide
  modified_base 112: mod_base = OTHER; note = Nucleotide with phosphorothioate linkage
  modified_base 113: mod_base = OTHER; note = 2'-O-methyl modified nucleotide with phosphorothioate linkage
  modified_base 114: mod_base = OTHER; note = 2'-O-methyl modified nucleotide with phosphorothioate linkage
  modified_base 115: mod_base = OTHER; note = 2'-O-methyl modified nucleotide
gctggtacacggcagggtcagttttagagctagaaatagcaagttaaaataaggctagtccgttatcaacttgaaaaagtggcaccgagtcggtgctatcctgaccctgccgtgt

SEQ ID NO: 16718 - RNA, 114 nt, synthetic construct
  source 1..114: mol_type = other RNA
  modified_base 1: mod_base = OTHER; note = 2'-O-methyl modified nucleotide with phosphorothioate linkage
  modified_base 2: mod_base = OTHER; note = 2'-O-methyl modified nucleotide with phosphorothioate linkage
  modified_base 3: mod_base = OTHER; note = 2'-O-methyl modified nucleotide with phosphorothioate linkage
  modified_base 29: mod_base = OTHER; note = 2'-O-methyl modified nucleotide
  modified_base 30: mod_base = OTHER; note = 2'-O-methyl modified nucleotide
  modified_base 31: mod_base = OTHER; note = 2'-O-methyl modified nucleotide
  modified_base 32: mod_base = OTHER; note = 2'-O-methyl modified nucleotide
  modified_base 33: mod_base = OTHER; note = 2'-O-methyl modified nucleotide
  modified_base 34: mod_base = OTHER; note = 2'-O-methyl modified nucleotide
  modified_base 35: mod_base = OTHER; note = 2'-O-methyl modified nucleotide
  modified_base 36: mod_base = OTHER; note = 2'-O-methyl modified nucleotide
  modified_base 37: mod_base = OTHER; note = 2'-O-methyl modified nucleotide
  modified_base 38: mod_base = OTHER; note = 2'-O-methyl modified nucleotide
  modified_base 39: mod_base = OTHER; note = 2'-O-methyl modified nucleotide
  modified_base 40: mod_base = OTHER; note = 2'-O-methyl modified nucleotide
  modified_base 69: mod_base = OTHER; note = 2'-O-methyl modified nucleotide
  modified_base 70: mod_base = OTHER; note = 2'-O-methyl modified nucleotide
  modified_base 71: mod_base = OTHER; note = 2'-O-methyl modified nucleotide
  modified_base 72: mod_base = OTHER; note = 2'-O-methyl modified nucleotide
  modified_base 73: mod_base = OTHER; note = 2'-O-methyl modified nucleotide
  modified_base 74: mod_base = OTHER; note = 2'-O-methyl modified nucleotide
  modified_base 75: mod_base = OTHER; note = 2'-O-methyl modified nucleotide
  modified_base 76: mod_base = OTHER; note = 2'-O-methyl modified nucleotide
  modified_base 77: mod_base = OTHER; note = 2'-O-methyl modified nucleotide
  modified_base 78: mod_base = OTHER; note = 2'-O-methyl modified nucleotide
  modified_base 79: mod_base = OTHER; note = 2'-O-methyl modified nucleotide
  modified_base 80: mod_base = OTHER; note = 2'-O-methyl modified nucleotide
  modified_base 81: mod_base = OTHER; note = 2'-O-methyl modified nucleotide
  modified_base 82: mod_base = OTHER; note = 2'-O-methyl modified nucleotide
  modified_base 83: mod_base = OTHER; note = 2'-O-methyl modified nucleotide
  modified_base 84: mod_base = OTHER; note = 2'-O-methyl modified nucleotide
  modified_base 85: mod_base = OTHER; note = 2'-O-methyl modified nucleotide
  modified_base 86: mod_base = OTHER; note = 2'-O-methyl modified nucleotide
  modified_base 87: mod_base = OTHER; note = 2'-O-methyl modified nucleotide
  modified_base 88: mod_base = OTHER; note = 2'-O-methyl modified nucleotide
  modified_base 89: mod_base = OTHER; note = 2'-O-methyl modified nucleotide
  modified_base 90: mod_base = OTHER; note = 2'-O-methyl modified nucleotide
  modified_base 91: mod_base = OTHER; note = 2'-O-methyl modified nucleotide
  modified_base 92: mod_base = OTHER; note = 2'-O-methyl modified nucleotide
  modified_base 93: mod_base = OTHER; note = 2'-O-methyl modified nucleotide
  modified_base 94: mod_base = OTHER; note = 2'-O-methyl modified nucleotide
  modified_base 95: mod_base = OTHER; note = 2'-O-methyl modified nucleotide
  modified_base 96: mod_base = OTHER; note = 2'-O-methyl modified nucleotide
  modified_base 111: mod_base = OTHER; note = Nucleotide with phosphorothioate linkage
  modified_base 112: mod_base = OTHER; note = 2'-O-methyl modified nucleotide with phosphorothioate linkage
  modified_base 113: mod_base = OTHER; note = 2'-O-methyl modified nucleotide with phosphorothioate linkage
  modified_base 114: mod_base = OTHER; note = 2'-O-methyl modified nucleotide
gctggtacacggcagggtcagttttagagctagaaatagcaagttaaaataaggctagtccgttatcaacttgaaaaagtggcaccgagtcggtgctatcctgaccctgccgtg

SEQ ID NO: 16719 - RNA, 113 nt, synthetic construct
  source 1..113: mol_type = other RNA
  modified_base 1: mod_base = OTHER; note = 2'-O-methyl modified nucleotide with phosphorothioate linkage
  modified_base 2: mod_base = OTHER; note = 2'-O-methyl modified nucleotide with phosphorothioate linkage
  modified_base 3: mod_base = OTHER; note = 2'-O-methyl modified nucleotide with phosphorothioate linkage
  modified_base 29: mod_base = OTHER; note = 2'-O-methyl modified nucleotide
  modified_base 30: mod_base = OTHER; note = 2'-O-methyl modified nucleotide
  modified_base 31: mod_base = OTHER; note = 2'-O-methyl modified nucleotide
  modified_base 32: mod_base = OTHER; note = 2'-O-methyl modified nucleotide
  modified_base 33: mod_base = OTHER; note = 2'-O-methyl modified nucleotide
  modified_base 34: mod_base = OTHER; note = 2'-O-methyl modified nucleotide
  modified_base 35: mod_base = OTHER; note = 2'-O-methyl modified nucleotide
  modified_base 36: mod_base = OTHER; note = 2'-O-methyl modified nucleotide
  modified_base 37: mod_base = OTHER; note = 2'-O-methyl modified nucleotide
  modified_base 38: mod_base = OTHER; note = 2'-O-methyl modified nucleotide
  modified_base 39: mod_base = OTHER; note = 2'-O-methyl modified nucleotide
  modified_base 40: mod_base = OTHER; note = 2'-O-methyl modified nucleotide
  modified_base 69: mod_base = OTHER; note = 2'-O-methyl modified nucleotide
  modified_base 70: mod_base = OTHER; note = 2'-O-methyl modified nucleotide
  modified_base 71: mod_base = OTHER; note = 2'-O-methyl modified nucleotide
  modified_base 72: mod_base = OTHER; note = 2'-O-methyl modified nucleotide
  modified_base 73: mod_base = OTHER; note = 2'-O-methyl modified nucleotide
  modified_base 74: mod_base = OTHER; note = 2'-O-methyl modified nucleotide
  modified_base 75: mod_base = OTHER; note = 2'-O-methyl modified nucleotide
  modified_base 76: mod_base = OTHER; note = 2'-O-methyl modified nucleotide
  modified_base 77: mod_base = OTHER; note = 2'-O-methyl modified nucleotide
  modified_base 78: mod_base = OTHER; note = 2'-O-methyl modified nucleotide
  modified_base 79: mod_base = OTHER; note = 2'-O-methyl modified nucleotide
  modified_base 80: mod_base = OTHER; note = 2'-O-methyl modified nucleotide
  modified_base 81: mod_base = OTHER; note = 2'-O-methyl modified nucleotide
  modified_base 82: mod_base = OTHER; note = 2'-O-methyl modified nucleotide
  modified_base 83: mod_base = OTHER; note = 2'-O-methyl modified nucleotide
  modified_base 84: mod_base = OTHER; note = 2'-O-methyl modified nucleotide
  modified_base 85: mod_base = OTHER; note = 2'-O-methyl modified nucleotide
  modified_base 86: mod_base = OTHER; note = 2'-O-methyl modified nucleotide
  modified_base 87: mod_base = OTHER; note = 2'-O-methyl modified nucleotide
  modified_base 88: mod_base = OTHER; note = 2'-O-methyl modified nucleotide
  modified_base 89: mod_base = OTHER; note = 2'-O-methyl modified nucleotide
  modified_base 90: mod_base = OTHER; note = 2'-O-methyl modified nucleotide
  modified_base 91: mod_base = OTHER; note = 2'-O-methyl modified nucleotide
  modified_base 92: mod_base = OTHER; note = 2'-O-methyl modified nucleotide
  modified_base 93: mod_base = OTHER; note = 2'-O-methyl modified nucleotide
  modified_base 94: mod_base = OTHER; note = 2'-O-methyl modified nucleotide
  modified_base 95: mod_base = OTHER; note = 2'-O-methyl modified nucleotide
  modified_base 96: mod_base = OTHER; note = 2'-O-methyl modified nucleotide
  modified_base 110: mod_base = OTHER; note = Nucleotide with phosphorothioate linkage
  modified_base 111: mod_base = OTHER; note = 2'-O-methyl modified nucleotide with phosphorothioate linkage
  modified_base 112: mod_base = OTHER; note = 2'-O-methyl modified nucleotide with phosphorothioate linkage
  modified_base 113: mod_base = OTHER; note = 2'-O-methyl modified nucleotide
gctggtacacggcagggtcagttttagagctagaaatagcaagttaaaataaggctagtccgttatcaacttgaaaaagtggcaccgagtcggtgctatcctgaccctgccgt

SEQ ID NO: 16720 - RNA, 112 nt, synthetic construct
  source 1..112: mol_type = other RNA
  modified_base 1: mod_base = OTHER; note = 2'-O-methyl modified nucleotide with phosphorothioate linkage
  modified_base 2: mod_base = OTHER; note = 2'-O-methyl modified nucleotide with phosphorothioate linkage
  modified_base 3: mod_base = OTHER; note = 2'-O-methyl modified nucleotide with phosphorothioate linkage
  modified_base 29: mod_base = OTHER; note = 2'-O-methyl modified nucleotide
  modified_base 30: mod_base = OTHER; note = 2'-O-methyl modified nucleotide
  modified_base 31: mod_base = OTHER; note = 2'-O-methyl modified nucleotide
  modified_base 32: mod_base = OTHER; note = 2'-O-methyl modified nucleotide
  modified_base 33: mod_base = OTHER; note = 2'-O-methyl modified nucleotide
  modified_base 34: mod_base = OTHER; note = 2'-O-methyl modified nucleotide
  modified_base 35: mod_base = OTHER; note = 2'-O-methyl modified nucleotide
  modified_base 36: mod_base = OTHER; note = 2'-O-methyl modified nucleotide
  modified_base 37: mod_base = OTHER; note = 2'-O-methyl modified nucleotide
  modified_base 38: mod_base = OTHER; note = 2'-O-methyl modified nucleotide
  modified_base 39: mod_base = OTHER; note = 2'-O-methyl modified nucleotide
  modified_base 40: mod_base = OTHER; note = 2'-O-methyl modified nucleotide
  modified_base 69: mod_base = OTHER; note = 2'-O-methyl modified nucleotide
  modified_base 70: mod_base = OTHER; note = 2'-O-methyl modified nucleotide
  modified_base 71: mod_base = OTHER; note = 2'-O-methyl modified nucleotide
  modified_base 72: mod_base = OTHER; note = 2'-O-methyl modified nucleotide
  modified_base 73: mod_base = OTHER; note = 2'-O-methyl modified nucleotide
  modified_base 74: mod_base = OTHER; note = 2'-O-methyl modified nucleotide
  modified_base 75: mod_base = OTHER; note = 2'-O-methyl modified nucleotide
  modified_base 76: mod_base = OTHER; note = 2'-O-methyl modified nucleotide
  modified_base 77: mod_base = OTHER; note = 2'-O-methyl modified nucleotide
  modified_base 78: mod_base = OTHER; note = 2'-O-methyl modified nucleotide
  modified_base 79: mod_base = OTHER; note = 2'-O-methyl modified nucleotide
  modified_base 80: mod_base = OTHER; note = 2'-O-methyl modified nucleotide
  modified_base 81: mod_base = OTHER; note = 2'-O-methyl modified nucleotide
  modified_base 82: mod_base = OTHER; note = 2'-O-methyl modified nucleotide
  modified_base 83: mod_base = OTHER; note = 2'-O-methyl modified nucleotide
  modified_base 84: mod_base = OTHER; note = 2'-O-methyl modified nucleotide
  modified_base 85: mod_base = OTHER; note = 2'-O-methyl modified nucleotide
  modified_base 86: mod_base = OTHER; note = 2'-O-methyl modified nucleotide
  modified_base 87: mod_base = OTHER; note = 2'-O-methyl modified nucleotide
  modified_base 88: mod_base = OTHER; note = 2'-O-methyl modified nucleotide
  modified_base 89: mod_base = OTHER; note = 2'-O-methyl modified nucleotide
  modified_base 90: mod_base = OTHER; note = 2'-O-methyl modified nucleotide
  modified_base 91: mod_base = OTHER; note = 2'-O-methyl modified nucleotide
  modified_base 92: mod_base = OTHER; note = 2'-O-methyl modified nucleotide
  modified_base 93: mod_base = OTHER; note = 2'-O-methyl modified nucleotide
  modified_base 94: mod_base = OTHER; note = 2'-O-methyl modified nucleotide
  modified_base 95: mod_base = OTHER; note = 2'-O-methyl modified nucleotide
  modified_base 96: mod_base = OTHER; note = 2'-O-methyl modified nucleotide
  modified_base 109: mod_base = OTHER; note = Nucleotide with phosphorothioate linkage
  modified_base 110: mod_base = OTHER; note = 2'-O-methyl modified nucleotide with phosphorothioate linkage
  modified_base 111: mod_base = OTHER; note = 2'-O-methyl modified nucleotide with phosphorothioate linkage
  modified_base 112: mod_base = OTHER; note = 2'-O-methyl modified nucleotide
gctggtacacggcagggtcagttttagagctagaaatagcaagttaaaataaggctagtccgttatcaacttgaaaaagtggcaccgagtcggtgctatcctgaccctgccg

SEQ ID NO: 16721 - RNA, 119 nt, synthetic construct
  source 1..119: mol_type = other RNA
  modified_base 1: mod_base = OTHER; note = 2'-O-methyl modified nucleotide with phosphorothioate linkage
  modified_base 2: mod_base = OTHER; note = 2'-O-methyl modified nucleotide with phosphorothioate linkage
  modified_base 3: mod_base = OTHER; note = 2'-O-methyl modified nucleotide with phosphorothioate linkage
  modified_base 29: mod_base = OTHER; note = 2'-O-methyl modified nucleotide
  modified_base 30: mod_base = OTHER; note = 2'-O-methyl modified nucleotide
  modified_base 31: mod_base = OTHER; note = 2'-O-methyl modified nucleotide
  modified_base 32: mod_base = OTHER; note = 2'-O-methyl modified nucleotide
  modified_base 33: mod_base = OTHER; note = 2'-O-methyl modified nucleotide
  modified_base 34: mod_base = OTHER; note = 2'-O-methyl modified nucleotide
  modified_base 35: mod_base = OTHER; note = 2'-O-methyl modified nucleotide
  modified_base 36: mod_base = OTHER; note = 2'-O-methyl modified nucleotide
  modified_base 37: mod_base = OTHER; note = 2'-O-methyl modified nucleotide
  modified_base 38: mod_base = OTHER; note = 2'-O-methyl modified nucleotide
  modified_base 39: mod_base = OTHER; note = 2'-O-methyl modified nucleotide
  modified_base 40: mod_base = OTHER; note = 2'-O-methyl modified nucleotide
  modified_base 69: mod_base = OTHER; note = 2'-O-methyl modified nucleotide
  modified_base 70: mod_base = OTHER; note = 2'-O-methyl modified nucleotide
  modified_base 71: mod_base = OTHER; note = 2'-O-methyl modified nucleotide
  modified_base 72: mod_base = OTHER; note = 2'-O-methyl modified nucleotide
  modified_base 73: mod_base = OTHER; note = 2'-O-methyl modified nucleotide
  modified_base 74: mod_base = OTHER; note = 2'-O-methyl modified nucleotide
  modified_base 75: mod_base = OTHER; note = 2'-O-methyl modified nucleotide
  modified_base 76: mod_base = OTHER; note = 2'-O-methyl modified nucleotide
  modified_base 77: mod_base = OTHER; note = 2'-O-methyl modified nucleotide
  modified_base 78: mod_base = OTHER; note = 2'-O-methyl modified nucleotide
  modified_base 79: mod_base = OTHER; note = 2'-O-methyl modified nucleotide
  modified_base 80: mod_base = OTHER; note = 2'-O-methyl modified nucleotide
  modified_base 81: mod_base = OTHER; note = 2'-O-methyl modified nucleotide
  modified_base 82: mod_base = OTHER; note = 2'-O-methyl modified nucleotide
  modified_base 83: mod_base = OTHER; note = 2'-O-methyl modified nucleotide
  modified_base 84: mod_base = OTHER; note = 2'-O-methyl modified nucleotide
  modified_base 85: mod_base = OTHER; note = 2'-O-methyl modified nucleotide
  modified_base 86: mod_base = OTHER; note = 2'-O-methyl modified nucleotide
  modified_base 87: mod_base = OTHER; note = 2'-O-methyl modified nucleotide
  modified_base 88: mod_base = OTHER; note = 2'-O-methyl modified nucleotide
  modified_base 89: mod_base = OTHER; note = 2'-O-methyl modified nucleotide
  modified_base 90: mod_base = OTHER; note = 2'-O-methyl modified nucleotide
  modified_base 91: mod_base = OTHER; note = 2'-O-methyl modified nucleotide
  modified_base 92: mod_base = OTHER; note = 2'-O-methyl modified nucleotide
  modified_base 93: mod_base = OTHER; note = 2'-O-methyl modified nucleotide
  modified_base 94: mod_base = OTHER; note = 2'-O-methyl modified nucleotide
  modified_base 95: mod_base = OTHER; note = 2'-O-methyl modified nucleotide
  modified_base 96: mod_base = OTHER; note = 2'-O-methyl modified nucleotide
  modified_base 116: mod_base = OTHER; note = Nucleotide with phosphorothioate linkage
  modified_base 117: mod_base = OTHER; note = 2'-O-methyl modified nucleotide with phosphorothioate linkage
  modified_base 118: mod_base = OTHER; note = 2'-O-methyl modified nucleotide with phosphorothioate linkage
  modified_base 119: mod_base = OTHER; note = 2'-O-methyl modified nucleotide
gctggtacacggcagggtcagttttagagctagaaatagcaagttaaaataaggctagtccgttatcaacttgaaaaagtggcaccgagtcggtgcgatatcctgaccctgccgtgtac

SEQ ID NO: 16722 - RNA, 118 nt, synthetic construct
  source 1..118: mol_type = other RNA
  modified_base 1: mod_base = OTHER; note = 2'-O-methyl modified nucleotide with phosphorothioate linkage
  modified_base 2: mod_base = OTHER; note = 2'-O-methyl modified nucleotide with phosphorothioate linkage
  modified_base 3: mod_base = OTHER; note = 2'-O-methyl modified nucleotide with phosphorothioate linkage
  modified_base 29: mod_base = OTHER; note = 2'-O-methyl modified nucleotide
  modified_base 30: mod_base = OTHER; note = 2'-O-methyl modified nucleotide
  modified_base 31: mod_base = OTHER; note = 2'-O-methyl modified nucleotide
  modified_base 32: mod_base = OTHER; note = 2'-O-methyl modified nucleotide
  modified_base 33: mod_base = OTHER; note = 2'-O-methyl modified nucleotide
  modified_base 34: mod_base = OTHER; note = 2'-O-methyl modified nucleotide
  modified_base 35: mod_base = OTHER; note = 2'-O-methyl modified nucleotide
  modified_base 36: mod_base = OTHER; note = 2'-O-methyl modified nucleotide
  modified_base 37: mod_base = OTHER; note = 2'-O-methyl modified nucleotide
  modified_base 38: mod_base = OTHER; note = 2'-O-methyl modified nucleotide
  modified_base 39: mod_base = OTHER; note = 2'-O-methyl modified nucleotide
  modified_base 40: mod_base = OTHER; note = 2'-O-methyl modified nucleotide
  modified_base 69: mod_base = OTHER; note = 2'-O-methyl modified nucleotide
  modified_base 70: mod_base = OTHER; note = 2'-O-methyl modified nucleotide
  modified_base 71: mod_base = OTHER; note = 2'-O-methyl modified nucleotide
  modified_base 72: mod_base = OTHER; note = 2'-O-methyl modified nucleotide
  modified_base 73: mod_base = OTHER; note = 2'-O-methyl modified nucleotide
  modified_base 74: mod_base = OTHER; note = 2'-O-methyl modified nucleotide
  modified_base 75: mod_base = OTHER; note = 2'-O-methyl modified nucleotide
  modified_base 76: mod_base = OTHER; note = 2'-O-methyl modified nucleotide
  modified_base 77: mod_base = OTHER; note = 2'-O-methyl modified nucleotide
  modified_base 78: mod_base = OTHER; note = 2'-O-methyl modified nucleotide
  modified_base 79: mod_base = OTHER; note = 2'-O-methyl modified nucleotide
  modified_base 80: mod_base = OTHER; note = 2'-O-methyl modified nucleotide
  modified_base 81: mod_base = OTHER; note = 2'-O-methyl modified nucleotide
  modified_base 82: mod_base = OTHER; note = 2'-O-methyl modified nucleotide
  modified_base 83: mod_base = OTHER; note = 2'-O-methyl modified nucleotide
  modified_base 84: mod_base = OTHER; note = 2'-O-methyl modified nucleotide
  modified_base 85: mod_base = OTHER; note = 2'-O-methyl modified nucleotide
  modified_base 86: mod_base = OTHER; note = 2'-O-methyl modified nucleotide
  modified_base 87: mod_base = OTHER; note = 2'-O-methyl modified nucleotide
  modified_base 88: mod_base = OTHER; note = 2'-O-methyl modified nucleotide
  modified_base 89: mod_base = OTHER; note = 2'-O-methyl modified nucleotide
  modified_base 90: mod_base = OTHER; note = 2'-O-methyl modified nucleotide
  modified_base 91: mod_base = OTHER; note = 2'-O-methyl modified nucleotide
  modified_base 92: mod_base = OTHER; note = 2'-O-methyl modified nucleotide
  modified_base 93: mod_base = OTHER; note = 2'-O-methyl modified nucleotide
  modified_base 94: mod_base = OTHER; note = 2'-O-methyl modified nucleotide
  modified_base 95: mod_base = OTHER; note = 2'-O-methyl modified nucleotide
  modified_base 96: mod_base = OTHER; note = 2'-O-methyl modified nucleotide
  modified_base 115: mod_base = OTHER; note = Nucleotide with phosphorothioate linkage
  modified_base 116: mod_base = OTHER; note = 2'-O-methyl modified nucleotide with phosphorothioate linkage
  modified_base 117: mod_base = OTHER; note = 2'-O-methyl modified nucleotide with phosphorothioate linkage
  modified_base 118: mod_base = OTHER; note = 2'-O-methyl modified nucleotide
gctggtacacggcagggtcagttttagagctagaaatagcaagttaaaataaggctagtccgttatcaacttgaaaaagtggcaccgagtcggtgcgatatcctgaccctgccgtgta

SEQ ID NO: 16723 - RNA, 117 nt, synthetic construct
  source 1..117: mol_type = other RNA
  modified_base 1: mod_base = OTHER; note = 2'-O-methyl modified nucleotide with phosphorothioate linkage
  modified_base 2: mod_base = OTHER; note = 2'-O-methyl modified nucleotide with phosphorothioate linkage
  modified_base 3: mod_base = OTHER; note = 2'-O-methyl modified nucleotide with phosphorothioate linkage
  modified_base 29: mod_base = OTHER; note = 2'-O-methyl modified nucleotide
  modified_base 30: mod_base = OTHER; note = 2'-O-methyl modified nucleotide
  modified_base 31: mod_base = OTHER; note = 2'-O-methyl modified nucleotide
  modified_base 32: mod_base = OTHER; note = 2'-O-methyl modified nucleotide
  modified_base 33: mod_base = OTHER; note = 2'-O-methyl modified nucleotide
  modified_base 34: mod_base = OTHER; note = 2'-O-methyl modified nucleotide
  modified_base 35: mod_base = OTHER; note = 2'-O-methyl modified nucleotide
  modified_base 36: mod_base = OTHER; note = 2'-O-methyl modified nucleotide
  modified_base 37: mod_base = OTHER; note = 2'-O-methyl modified nucleotide
  modified_base 38: mod_base = OTHER; note = 2'-O-methyl modified nucleotide
  modified_base 39: mod_base = OTHER; note = 2'-O-methyl modified nucleotide
  modified_base 40: mod_base = OTHER; note = 2'-O-methyl modified nucleotide
  modified_base 69: mod_base = OTHER; note = 2'-O-methyl modified nucleotide
  modified_base 70: mod_base = OTHER; note = 2'-O-methyl modified nucleotide
  modified_base 71: mod_base = OTHER; note = 2'-O-methyl modified nucleotide
  modified_base 72: mod_base = OTHER; note = 2'-O-methyl modified nucleotide
  modified_base 73: mod_base = OTHER; note = 2'-O-methyl modified nucleotide
  modified_base 74: mod_base = OTHER; note = 2'-O-methyl modified nucleotide
  modified_base 75: mod_base = OTHER; note = 2'-O-methyl modified nucleotide
  modified_base 76: mod_base = OTHER; note = 2'-O-methyl modified nucleotide
  modified_base 77: mod_base = OTHER; note = 2'-O-methyl modified nucleotide
  modified_base 78: mod_base = OTHER; note = 2'-O-methyl modified nucleotide
  modified_base 79: mod_base = OTHER; note = 2'-O-methyl modified nucleotide
  modified_base 80: mod_base = OTHER; note = 2'-O-methyl modified nucleotide
  modified_base 81: mod_base = OTHER; note = 2'-O-methyl modified nucleotide
  modified_base 82: mod_base = OTHER; note = 2'-O-methyl modified nucleotide
  modified_base 83: mod_base = OTHER; note = 2'-O-methyl modified nucleotide
  modified_base 84: mod_base = OTHER; note = 2'-O-methyl modified nucleotide
  modified_base 85: mod_base = OTHER; note = 2'-O-methyl modified nucleotide
  modified_base 86: mod_base = OTHER; note = 2'-O-methyl modified nucleotide
  modified_base 87: mod_base = OTHER; note = 2'-O-methyl modified nucleotide
  modified_base 88: mod_base = OTHER; note = 2'-O-methyl modified nucleotide
  modified_base 89: mod_base = OTHER; note = 2'-O-methyl modified nucleotide
  modified_base 90: mod_base = OTHER; note = 2'-O-methyl modified nucleotide
  modified_base 91: mod_base = OTHER; note = 2'-O-methyl modified nucleotide
  modified_base 92: mod_base = OTHER; note = 2'-O-methyl modified nucleotide
  modified_base 93: mod_base = OTHER; note = 2'-O-methyl modified nucleotide
  modified_base 94: mod_base = OTHER; note = 2'-O-methyl modified nucleotide
  modified_base 95: mod_base = OTHER; note = 2'-O-methyl modified nucleotide
  modified_base 96: mod_base = OTHER; note = 2'-O-methyl modified nucleotide
  modified_base 114: mod_base = OTHER; note = Nucleotide with phosphorothioate linkage
  modified_base 115: mod_base = OTHER; note = 2'-O-methyl modified nucleotide with phosphorothioate linkage
  modified_base 116: mod_base = OTHER; note = 2'-O-methyl modified nucleotide with phosphorothioate linkage
  modified_base 117: mod_base = OTHER; note = 2'-O-methyl modified nucleotide
gctggtacacggcagggtcagttttagagctagaaatagcaagttaaaataaggctagtccgttatcaacttgaaaaagtggcaccgagtcggtgcgatatcctgaccctgccgtgt

SEQ ID NO: 16724 - RNA, 116 nt, synthetic construct
  source 1..116: mol_type = other RNA
  modified_base 1: mod_base = OTHER; note = 2'-O-methyl modified nucleotide with phosphorothioate linkage
  modified_base 2: mod_base = OTHER; note = 2'-O-methyl modified nucleotide with phosphorothioate linkage
  modified_base 3: mod_base = OTHER; note = 2'-O-methyl modified nucleotide with phosphorothioate linkage
  modified_base 29: mod_base = OTHER; note = 2'-O-methyl modified nucleotide
  modified_base 30: mod_base = OTHER; note = 2'-O-methyl modified nucleotide
  modified_base 31: mod_base = OTHER; note = 2'-O-methyl modified nucleotide
  modified_base 32: mod_base = OTHER; note = 2'-O-methyl modified nucleotide
  modified_base 33: mod_base = OTHER; note = 2'-O-methyl modified nucleotide
  modified_base 34: mod_base = OTHER; note = 2'-O-methyl modified nucleotide
  modified_base 35: mod_base = OTHER; note = 2'-O-methyl modified nucleotide
  modified_base 36: mod_base = OTHER; note = 2'-O-methyl modified nucleotide
  modified_base 37: mod_base = OTHER; note = 2'-O-methyl modified nucleotide
  modified_base 38: mod_base = OTHER; note = 2'-O-methyl modified nucleotide
  modified_base 39: mod_base = OTHER; note = 2'-O-methyl modified nucleotide
  modified_base 40: mod_base = OTHER; note = 2'-O-methyl modified nucleotide
  modified_base 69: mod_base = OTHER; note = 2'-O-methyl modified nucleotide
  modified_base 70: mod_base = OTHER; note = 2'-O-methyl modified nucleotide
  modified_base 71: mod_base = OTHER; note = 2'-O-methyl modified nucleotide
  modified_base 72: mod_base = OTHER; note = 2'-O-methyl modified nucleotide
  modified_base 73: mod_base = OTHER; note = 2'-O-methyl modified nucleotide
  modified_base 74: mod_base = OTHER; note = 2'-O-methyl modified nucleotide
  modified_base 75: mod_base = OTHER; note = 2'-O-methyl modified nucleotide
  modified_base 76: mod_base = OTHER; note = 2'-O-methyl modified nucleotide
  modified_base 77: mod_base = OTHER; note = 2'-O-methyl modified nucleotide
  modified_base 78: mod_base = OTHER; note = 2'-O-methyl modified nucleotide
  modified_base 79: mod_base = OTHER; note = 2'-O-methyl modified nucleotide
  modified_base 80: mod_base = OTHER; note = 2'-O-methyl modified nucleotide
  modified_base 81: mod_base = OTHER; note = 2'-O-methyl modified nucleotide
  modified_base 82: mod_base = OTHER; note = 2'-O-methyl modified nucleotide
  modified_base 83: mod_base = OTHER; note = 2'-O-methyl modified nucleotide
  modified_base 84: mod_base = OTHER; note = 2'-O-methyl modified nucleotide
  modified_base 85: mod_base = OTHER; note = 2'-O-methyl modified nucleotide
  modified_base 86: mod_base = OTHER; note = 2'-O-methyl modified nucleotide
  modified_base 87: mod_base = OTHER; note = 2'-O-methyl modified nucleotide
  modified_base 88: mod_base = OTHER; note = 2'-O-methyl modified nucleotide
  modified_base 89: mod_base = OTHER; note = 2'-O-methyl modified nucleotide
  modified_base 90: mod_base = OTHER; note = 2'-O-methyl modified nucleotide
  modified_base 91: mod_base = OTHER; note = 2'-O-methyl modified nucleotide
  modified_base 92: mod_base = OTHER; note = 2'-O-methyl modified nucleotide
  modified_base 93: mod_base = OTHER; note = 2'-O-methyl modified nucleotide
  modified_base 94: mod_base = OTHER; note = 2'-O-methyl modified nucleotide
  modified_base 95: mod_base = OTHER; note = 2'-O-methyl modified nucleotide
  modified_base 96: mod_base = OTHER; note = 2'-O-methyl modified nucleotide
  modified_base 113: mod_base = OTHER; note = Nucleotide with phosphorothioate linkage
  modified_base 114: mod_base = OTHER; note = 2'-O-methyl modified nucleotide with phosphorothioate linkage
  modified_base 115: mod_base = OTHER; note = 2'-O-methyl modified nucleotide with phosphorothioate linkage
  modified_base 116: mod_base = OTHER; note = 2'-O-methyl modified nucleotide
gctggtacacggcagggtcagttttagagctagaaatagcaagttaaaataaggctagtccgttatcaacttgaaaaagtggcaccgagtcggtgcgatatcctgaccctgccgtg

SEQ ID NO: 16725 - RNA, 115 nt, synthetic construct
  source 1..115: mol_type = other RNA
  modified_base 1: mod_base = OTHER; note = 2'-O-methyl modified nucleotide with phosphorothioate linkage
  modified_base 2: mod_base = OTHER; note = 2'-O-methyl modified nucleotide with phosphorothioate linkage
  modified_base 3: mod_base = OTHER; note = 2'-O-methyl modified nucleotide with phosphorothioate linkage
  modified_base 29: mod_base = OTHER; note = 2'-O-methyl modified nucleotide
  modified_base 30: mod_base = OTHER; note = 2'-O-methyl modified nucleotide
  modified_base 31: mod_base = OTHER; note = 2'-O-methyl modified nucleotide
  modified_base 32: mod_base = OTHER; note = 2'-O-methyl modified nucleotide
  modified_base 33: mod_base = OTHER; note = 2'-O-methyl modified nucleotide
  modified_base 34: mod_base = OTHER; note = 2'-O-methyl modified nucleotide
  modified_base 35: mod_base = OTHER; note = 2'-O-methyl modified nucleotide
  modified_base 36: mod_base = OTHER; note = 2'-O-methyl modified nucleotide
  modified_base 37: mod_base = OTHER; note = 2'-O-methyl modified nucleotide
  modified_base 38: mod_base = OTHER; note = 2'-O-methyl modified nucleotide
  modified_base 39: mod_base = OTHER; note = 2'-O-methyl modified nucleotide
  modified_base 40: mod_base = OTHER; note = 2'-O-methyl modified nucleotide
  modified_base 69: mod_base = OTHER; note = 2'-O-methyl modified nucleotide
  modified_base 70: mod_base = OTHER; note = 2'-O-methyl modified nucleotide
  modified_base 71: mod_base = OTHER; note = 2'-O-methyl modified nucleotide
  modified_base 72: mod_base = OTHER; note = 2'-O-methyl modified nucleotide
  modified_base 73: mod_base = OTHER; note = 2'-O-methyl modified nucleotide
  modified_base 74: mod_base = OTHER; note = 2'-O-methyl modified nucleotide
  modified_base 75: mod_base = OTHER; note = 2'-O-methyl modified nucleotide
  modified_base 76: mod_base = OTHER; note = 2'-O-methyl modified nucleotide
  modified_base 77: mod_base = OTHER; note = 2'-O-methyl modified nucleotide
  modified_base 78: mod_base = OTHER; note = 2'-O-methyl modified nucleotide
  modified_base 79: mod_base = OTHER; note = 2'-O-methyl modified nucleotide
  modified_base 80: mod_base = OTHER; note = 2'-O-methyl modified nucleotide
  modified_base 81: mod_base = OTHER; note = 2'-O-methyl modified nucleotide
  modified_base 82: mod_base = OTHER; note = 2'-O-methyl modified nucleotide
  modified_base 83: mod_base = OTHER; note = 2'-O-methyl modified nucleotide
  modified_base 84: mod_base = OTHER; note = 2'-O-methyl modified nucleotide
  modified_base 85: mod_base = OTHER; note = 2'-O-methyl modified nucleotide
  modified_base 86: mod_base = OTHER; note = 2'-O-methyl modified nucleotide
  modified_base 87: mod_base = OTHER; note = 2'-O-methyl modified nucleotide
  modified_base 88: mod_base = OTHER; note = 2'-O-methyl modified nucleotide
  modified_base 89: mod_base = OTHER; note = 2'-O-methyl modified nucleotide
  modified_base 90: mod_base = OTHER; note = 2'-O-methyl modified nucleotide
  modified_base 91: mod_base = OTHER; note = 2'-O-methyl modified nucleotide
  modified_base 92: mod_base = OTHER; note = 2'-O-methyl modified nucleotide
  modified_base 93: mod_base = OTHER; note = 2'-O-methyl modified nucleotide
  modified_base 94: mod_base = OTHER; note = 2'-O-methyl modified nucleotide
  modified_base 95: mod_base = OTHER; note = 2'-O-methyl modified nucleotide
  modified_base 96: mod_base = OTHER; note = 2'-O-methyl modified nucleotide
  modified_base 112: mod_base = OTHER; note = Nucleotide with phosphorothioate linkage
  modified_base 113: mod_base = OTHER; note = 2'-O-methyl modified nucleotide with phosphorothioate linkage
  modified_base 114: mod_base = OTHER; note = 2'-O-methyl modified nucleotide with phosphorothioate linkage
  modified_base 115: mod_base = OTHER; note = 2'-O-methyl modified nucleotide
gctggtacacggcagggtcagttttagagctagaaatagcaagttaaaataaggctagtccgttatcaacttgaaaaagtggcaccgagtcggtgcgatatcctgaccctgccgt

SEQ ID NO: 16726 - RNA, 114 nt, synthetic construct
  source 1..114: mol_type = other RNA
  modified_base 1: mod_base = OTHER; note = 2'-O-methyl modified nucleotide with phosphorothioate linkage
  modified_base 2: mod_base = OTHER; note = 2'-O-methyl modified nucleotide with phosphorothioate linkage
  modified_base 3: mod_base = OTHER; note = 2'-O-methyl modified nucleotide with phosphorothioate linkage
  modified_base 29: mod_base = OTHER; note = 2'-O-methyl modified nucleotide
  modified_base 30: mod_base = OTHER; note = 2'-O-methyl modified nucleotide
  modified_base 31: mod_base = OTHER; note = 2'-O-methyl modified nucleotide
  modified_base 32: mod_base = OTHER; note = 2'-O-methyl modified nucleotide
  modified_base 33: mod_base = OTHER; note = 2'-O-methyl modified nucleotide
  modified_base 34: mod_base = OTHER; note = 2'-O-methyl modified nucleotide
  modified_base 35: mod_base = OTHER; note = 2'-O-methyl modified nucleotide
  modified_base 36: mod_base = OTHER; note = 2'-O-methyl modified nucleotide
  modified_base 37: mod_base = OTHER; note = 2'-O-methyl modified nucleotide
  modified_base 38: mod_base = OTHER; note = 2'-O-methyl modified nucleotide
  modified_base 39: mod_base = OTHER; note = 2'-O-methyl modified nucleotide
  modified_base 40: mod_base = OTHER; note = 2'-O-methyl modified nucleotide
  modified_base 69: mod_base = OTHER; note = 2'-O-methyl modified nucleotide
  modified_base 70: mod_base = OTHER; note = 2'-O-methyl modified nucleotide
  modified_base 71: mod_base = OTHER; note = 2'-O-methyl modified nucleotide
  modified_base 72: mod_base = OTHER; note = 2'-O-methyl modified nucleotide
  modified_base 73: mod_base = OTHER; note = 2'-O-methyl modified nucleotide
  modified_base 74: mod_base = OTHER; note = 2'-O-methyl modified nucleotide
  modified_base 75: mod_base = OTHER; note = 2'-O-methyl modified nucleotide
  modified_base 76: mod_base = OTHER; note = 2'-O-methyl modified nucleotide
  modified_base 77: mod_base = OTHER; note = 2'-O-methyl modified nucleotide
  modified_base 78: mod_base = OTHER; note = 2'-O-methyl modified nucleotide
  modified_base 79: mod_base = OTHER; note = 2'-O-methyl modified nucleotide
  modified_base 80: mod_base = OTHER; note = 2'-O-methyl modified nucleotide
  modified_base 81: mod_base = OTHER; note = 2'-O-methyl modified nucleotide
  modified_base 82: mod_base = OTHER; note = 2'-O-methyl modified nucleotide
  modified_base 83: mod_base = OTHER; note = 2'-O-methyl modified nucleotide
  modified_base 84: mod_base = OTHER; note = 2'-O-methyl modified nucleotide
  modified_base 85: mod_base = OTHER; note = 2'-O-methyl modified nucleotide
  modified_base 86: mod_base = OTHER; note = 2'-O-methyl modified nucleotide
  modified_base 87: mod_base = OTHER; note = 2'-O-methyl modified nucleotide
  modified_base 88: mod_base = OTHER; note = 2'-O-methyl modified nucleotide
  modified_base 89: mod_base = OTHER; note = 2'-O-methyl modified nucleotide
  modified_base 90: mod_base = OTHER; note = 2'-O-methyl modified nucleotide
  modified_base 91: mod_base = OTHER; note = 2'-O-methyl modified nucleotide
  modified_base 92: mod_base = OTHER; note = 2'-O-methyl modified nucleotide
  modified_base 93: mod_base = OTHER; note = 2'-O-methyl modified nucleotide
  modified_base 94: mod_base = OTHER; note = 2'-O-methyl modified nucleotide
  modified_base 95: mod_base = OTHER; note = 2'-O-methyl modified nucleotide
  modified_base 96: mod_base = OTHER; note = 2'-O-methyl modified nucleotide
  modified_base 111: mod_base = OTHER; note = Nucleotide with phosphorothioate linkage
  modified_base 112: mod_base = OTHER; note = 2'-O-methyl modified nucleotide with phosphorothioate linkage
  modified_base 113: mod_base = OTHER; note = 2'-O-methyl modified nucleotide with phosphorothioate linkage
  modified_base 114: mod_base = OTHER; note = 2'-O-methyl modified nucleotide
gctggtacacggcagggtcagttttagagctagaaatagcaagttaaaataaggctagtccgttatcaacttgaaaaagtggcaccgagtcggtgcgatatcctgaccctgccg

SEQ ID NO: 16727 - RNA, 121 nt, synthetic construct
  source 1..121: mol_type = other RNA
  modified_base 1: mod_base = OTHER; note = 2'-O-methyl modified nucleotide with phosphorothioate linkage
  modified_base 2: mod_base = OTHER; note = 2'-O-methyl modified nucleotide with phosphorothioate linkage
  modified_base 3: mod_base = OTHER; note = 2'-O-methyl modified nucleotide with phosphorothioate linkage
  modified_base 29: mod_base = OTHER; note = 2'-O-methyl modified nucleotide
  modified_base 30: mod_base = OTHER; note = 2'-O-methyl modified nucleotide
  modified_base 31: mod_base = OTHER; note = 2'-O-methyl modified nucleotide
  modified_base 32: mod_base = OTHER; note = 2'-O-methyl modified nucleotide
  modified_base 33: mod_base = OTHER; note = 2'-O-methyl modified nucleotide
  modified_base 34: mod_base = OTHER; note = 2'-O-methyl modified nucleotide
  modified_base 35: mod_base = OTHER; note = 2'-O-methyl modified nucleotide
  modified_base 36: mod_base = OTHER; note = 2'-O-methyl modified nucleotide
  modified_base 37: mod_base = OTHER; note = 2'-O-methyl modified nucleotide
  modified_base 38: mod_base = OTHER; note = 2'-O-methyl modified nucleotide
  modified_base 39: mod_base = OTHER; note = 2'-O-methyl modified nucleotide
  modified_base 40: mod_base = OTHER; note = 2'-O-methyl modified nucleotide
  modified_base 69: mod_base = OTHER; note = 2'-O-methyl modified nucleotide
  modified_base 70: mod_base = OTHER; note = 2'-O-methyl modified nucleotide
  modified_base 71: mod_base = OTHER; note = 2'-O-methyl modified nucleotide
  modified_base 72: mod_base = OTHER; note = 2'-O-methyl modified nucleotide
  modified_base 73: mod_base = OTHER; note = 2'-O-methyl modified nucleotide
  modified_base 74: mod_base = OTHER; note = 2'-O-methyl modified nucleotide
  modified_base 75: mod_base = OTHER; note = 2'-O-methyl modified nucleotide
  modified_base 76: mod_base = OTHER; note = 2'-O-methyl modified nucleotide
  modified_base 77: mod_base = OTHER; note = 2'-O-methyl modified nucleotide
  modified_base 78: mod_base = OTHER; note = 2'-O-methyl modified nucleotide
  modified_base 79: mod_base = OTHER; note = 2'-O-methyl modified nucleotide
  modified_base 80: mod_base = OTHER; note = 2'-O-methyl modified nucleotide
  modified_base 81: mod_base = OTHER; note = 2'-O-methyl modified nucleotide
  modified_base 82: mod_base = OTHER; note = 2'-O-methyl modified nucleotide
  modified_base 83: mod_base = OTHER; note = 2'-O-methyl modified nucleotide
  modified_base 84: mod_base = OTHER; note = 2'-O-methyl modified nucleotide
  modified_base 85: mod_base = OTHER; note = 2'-O-methyl modified nucleotide
  modified_base 86: mod_base = OTHER; note = 2'-O-methyl modified nucleotide
  modified_base 87: mod_base = OTHER; note = 2'-O-methyl modified nucleotide
  modified_base 88: mod_base = OTHER; note = 2'-O-methyl modified nucleotide
  modified_base 89: mod_base = OTHER; note = 2'-O-methyl modified nucleotide
  modified_base 90: mod_base = OTHER; note = 2'-O-methyl modified nucleotide
  modified_base 91: mod_base = OTHER; note = 2'-O-methyl modified nucleotide
  modified_base 92: mod_base = OTHER; note = 2'-O-methyl modified nucleotide
  modified_base 93: mod_base = OTHER; note = 2'-O-methyl modified nucleotide
  modified_base 94: mod_base = OTHER; note = 2'-O-methyl modified nucleotide
  modified_base 95: mod_base = OTHER; note = 2'-O-methyl modified nucleotide
  modified_base 96: mod_base = OTHER; note = 2'-O-methyl modified nucleotide
  modified_base 118: mod_base = OTHER; note = Nucleotide with phosphorothioate linkage
  modified_base 119: mod_base = OTHER; note = 2'-O-methyl modified nucleotide with phosphorothioate linkage
  modified_base 120: mod_base = OTHER; note = 2'-O-methyl modified nucleotide with phosphorothioate linkage
  modified_base 121: mod_base = OTHER; note = 2'-O-methyl modified nucleotide
gctggtacacggcagggtcagttttagagctagaaatagcaagttaaaataaggctagtccgttatcaacttgaaaaagtggcaccgagtcggtgccagatatcctgaccctgccgtgtac

SEQ ID NO: 16728 - RNA, 120 nt, synthetic construct
  source 1..120: mol_type = other RNA
  modified_base 1: mod_base = OTHER; note = 2'-O-methyl modified nucleotide with phosphorothioate linkage
  modified_base 2: mod_base = OTHER; note = 2'-O-methyl modified nucleotide with phosphorothioate linkage
  modified_base 3: mod_base = OTHER; note = 2'-O-methyl modified nucleotide with phosphorothioate linkage
  modified_base 29: mod_base = OTHER; note = 2'-O-methyl modified nucleotide
  modified_base 30: mod_base = OTHER; note = 2'-O-methyl modified nucleotide
  modified_base 31: mod_base = OTHER; note = 2'-O-methyl modified nucleotide
  modified_base 32: mod_base = OTHER; note = 2'-O-methyl modified nucleotide
  modified_base 33: mod_base = OTHER; note = 2'-O-methyl modified nucleotide
  modified_base 34: mod_base = OTHER; note = 2'-O-methyl modified nucleotide
  modified_base 35: mod_base = OTHER; note = 2'-O-methyl modified nucleotide
  modified_base 36: mod_base = OTHER; note = 2'-O-methyl modified nucleotide
  modified_base 37: mod_base = OTHER; note = 2'-O-methyl modified nucleotide
  modified_base 38: mod_base = OTHER; note = 2'-O-methyl modified nucleotide
  modified_base 39: mod_base = OTHER; note = 2'-O-methyl modified nucleotide
  modified_base 40: mod_base = OTHER; note = 2'-O-methyl modified nucleotide
  modified_base 69: mod_base = OTHER; note = 2'-O-methyl modified nucleotide
  modified_base 70: mod_base = OTHER; note = 2'-O-methyl modified nucleotide
  modified_base 71: mod_base = OTHER; note = 2'-O-methyl modified nucleotide
  modified_base 72: mod_base = OTHER; note = 2'-O-methyl modified nucleotide
  modified_base 73: mod_base = OTHER; note = 2'-O-methyl modified nucleotide
  modified_base 74: mod_base = OTHER; note = 2'-O-methyl modified nucleotide
  modified_base 75: mod_base = OTHER; note = 2'-O-methyl modified nucleotide
  modified_base 76: mod_base = OTHER; note = 2'-O-methyl modified nucleotide
  modified_base 77: mod_base = OTHER; note = 2'-O-methyl modified nucleotide
  modified_base 78: mod_base = OTHER; note = 2'-O-methyl modified nucleotide
  modified_base 79: mod_base = OTHER; note = 2'-O-methyl modified nucleotide
  modified_base 80: mod_base = OTHER; note = 2'-O-methyl modified nucleotide
  modified_base 81: mod_base = OTHER; note = 2'-O-methyl modified nucleotide
  modified_base 82: mod_base = OTHER; note = 2'-O-methyl modified nucleotide
  modified_base 83: mod_base = OTHER; note = 2'-O-methyl modified nucleotide
  modified_base 84: mod_base = OTHER; note = 2'-O-methyl modified nucleotide
  modified_base 85: mod_base = OTHER; note = 2'-O-methyl modified nucleotide
  modified_base 86: mod_base = OTHER; note = 2'-O-methyl modified nucleotide
  modified_base 87: mod_base = OTHER; note = 2'-O-methyl modified nucleotide
  modified_base 88: mod_base = OTHER; note = 2'-O-methyl modified nucleotide
  modified_base 89: mod_base = OTHER; note = 2'-O-methyl modified nucleotide
  modified_base 90: mod_base = OTHER; note = 2'-O-methyl modified nucleotide
  modified_base 91: mod_base = OTHER; note = 2'-O-methyl modified nucleotide
  modified_base 92: mod_base = OTHER; note = 2'-O-methyl modified nucleotide
  modified_base 93: mod_base = OTHER; note = 2'-O-methyl modified nucleotide
  modified_base 94: mod_base = OTHER; note = 2'-O-methyl modified nucleotide
  modified_base 95: mod_base = OTHER; note = 2'-O-methyl modified nucleotide
  modified_base 96: mod_base = OTHER; note = 2'-O-methyl modified nucleotide
  modified_base 117: mod_base = OTHER; note = Nucleotide with phosphorothioate linkage
  modified_base 118: mod_base = OTHER; note = 2'-O-methyl modified nucleotide with phosphorothioate linkage
  modified_base 119: mod_base = OTHER; note = 2'-O-methyl modified nucleotide with phosphorothioate linkage
  modified_base 120: mod_base = OTHER; note = 2'-O-methyl modified nucleotide
gctggtacacggcagggtcagttttagagctagaaatagcaagttaaaataaggctagtccgttatcaacttgaaaaagtggcaccgagtcggtgccagatatcctgaccctgccgtgta

SEQ ID NO: 16729 - RNA, 119 nt, synthetic construct
  source 1..119: mol_type = other RNA
  modified_base 1: mod_base = OTHER; note = 2'-O-methyl modified nucleotide with phosphorothioate linkage
  modified_base 2: mod_base = OTHER; note = 2'-O-methyl modified nucleotide with phosphorothioate linkage
  modified_base 3: mod_base = OTHER; note = 2'-O-methyl modified nucleotide with phosphorothioate linkage
  modified_base 29: mod_base = OTHER; note = 2'-O-methyl modified nucleotide
  modified_base 30: mod_base = OTHER; note = 2'-O-methyl modified nucleotide
  modified_base 31: mod_base = OTHER; note = 2'-O-methyl modified nucleotide
  modified_base 32: mod_base = OTHER; note = 2'-O-methyl modified nucleotide
  modified_base 33: mod_base = OTHER; note = 2'-O-methyl modified nucleotide
  modified_base 34: mod_base = OTHER; note = 2'-O-methyl modified nucleotide
  modified_base 35: mod_base = OTHER; note = 2'-O-methyl modified nucleotide
  modified_base 36: mod_base = OTHER; note = 2'-O-methyl modified nucleotide
  modified_base 37: mod_base = OTHER; note = 2'-O-methyl modified nucleotide
  modified_base 38: mod_base = OTHER; note = 2'-O-methyl modified nucleotide
  modified_base 39: mod_base = OTHER; note = 2'-O-methyl modified nucleotide
  modified_base 40: mod_base = OTHER; note = 2'-O-methyl modified nucleotide
  modified_base 69: mod_base = OTHER; note = 2'-O-methyl modified nucleotide
  modified_base 70: mod_base = OTHER; note = 2'-O-methyl modified nucleotide
  modified_base 71: mod_base = OTHER; note = 2'-O-methyl modified nucleotide
  modified_base 72: mod_base = OTHER; note = 2'-O-methyl modified nucleotide
  modified_base 73: mod_base = OTHER; note = 2'-O-methyl modified nucleotide
  modified_base 74: mod_base = OTHER; note = 2'-O-methyl modified nucleotide
  modified_base 75: mod_base = OTHER; note = 2'-O-methyl modified nucleotide
  modified_base 76: mod_base = OTHER; note = 2'-O-methyl modified nucleotide
  modified_base 77: mod_base = OTHER; note = 2'-O-methyl modified nucleotide
  modified_base 78: mod_base = OTHER; note = 2'-O-methyl modified nucleotide
  modified_base 79: mod_base = OTHER; note = 2'-O-methyl modified nucleotide
  modified_base 80: mod_base = OTHER; note = 2'-O-methyl modified nucleotide
  modified_base 81: mod_base = OTHER; note = 2'-O-methyl modified nucleotide
  modified_base 82: mod_base = OTHER; note = 2'-O-methyl modified nucleotide
  modified_base 83: mod_base = OTHER; note = 2'-O-methyl modified nucleotide
  modified_base 84: mod_base = OTHER; note = 2'-O-methyl modified nucleotide
  modified_base 85: mod_base = OTHER; note = 2'-O-methyl modified nucleotide
  modified_base 86: mod_base = OTHER; note = 2'-O-methyl modified nucleotide
  modified_base 87: mod_base = OTHER; note = 2'-O-methyl modified nucleotide
  modified_base 88: mod_base = OTHER; note = 2'-O-methyl modified nucleotide
  modified_base 89: mod_base = OTHER; note = 2'-O-methyl modified nucleotide
  modified_base 90: mod_base = OTHER; note = 2'-O-methyl modified nucleotide
  modified_base 91: mod_base = OTHER; note = 2'-O-methyl modified nucleotide
  modified_base 92: mod_base = OTHER; note = 2'-O-methyl modified nucleotide
  modified_base 93: mod_base = OTHER; note = 2'-O-methyl modified nucleotide
  modified_base 94: mod_base = OTHER; note = 2'-O-methyl modified nucleotide
  modified_base 95: mod_base = OTHER; note = 2'-O-methyl modified nucleotide
  modified_base 96: mod_base = OTHER; note = 2'-O-methyl modified nucleotide
  modified_base 116: mod_base = OTHER; note = Nucleotide with phosphorothioate linkage
  modified_base 117: mod_base = OTHER; note = 2'-O-methyl modified nucleotide with phosphorothioate linkage
  modified_base 118: mod_base = OTHER; note = 2'-O-methyl modified nucleotide with phosphorothioate linkage
  modified_base 119: mod_base = OTHER; note = 2'-O-methyl modified nucleotide
gctggtacacggcagggtcagttttagagctagaaatagcaagttaaaataaggctagtccgttatcaacttgaaaaagtggcaccgagtcggtgccagatatcctgaccctgccgtgt

SEQ ID NO: 16730 - RNA, 118 nt, synthetic construct
  source 1..118: mol_type = other RNA
  modified_base 1: mod_base = OTHER; note = 2'-O-methyl modified nucleotide with phosphorothioate linkage
  modified_base 2: mod_base = OTHER; note = 2'-O-methyl modified nucleotide with phosphorothioate linkage
  modified_base 3: mod_base = OTHER; note = 2'-O-methyl modified nucleotide with phosphorothioate linkage
  modified_base 29: mod_base = OTHER; note = 2'-O-methyl modified nucleotide
  modified_base 30: mod_base = OTHER; note = 2'-O-methyl modified nucleotide
  modified_base 31: mod_base = OTHER; note = 2'-O-methyl modified nucleotide
  modified_base 32: mod_base = OTHER; note = 2'-O-methyl modified nucleotide
  modified_base 33: mod_base = OTHER; note = 2'-O-methyl modified nucleotide
  modified_base 34: mod_base = OTHER; note = 2'-O-methyl modified nucleotide
  modified_base 35: mod_base = OTHER; note = 2'-O-methyl modified nucleotide
  modified_base 36: mod_base = OTHER; note = 2'-O-methyl modified nucleotide
  modified_base 37: mod_base = OTHER; note = 2'-O-methyl modified nucleotide
  modified_base 38: mod_base = OTHER; note = 2'-O-methyl modified nucleotide
  modified_base 39: mod_base = OTHER; note = 2'-O-methyl modified nucleotide
  modified_base 40: mod_base = OTHER; note = 2'-O-methyl modified nucleotide
  modified_base 69: mod_base = OTHER; note = 2'-O-methyl modified nucleotide
  modified_base 70: mod_base = OTHER; note = 2'-O-methyl modified nucleotide
  modified_base 71: mod_base = OTHER; note = 2'-O-methyl modified nucleotide
  modified_base 72: mod_base = OTHER; note = 2'-O-methyl modified nucleotide
  modified_base 73: mod_base = OTHER; note = 2'-O-methyl modified nucleotide
  modified_base 74: mod_base = OTHER; note = 2'-O-methyl modified nucleotide
  modified_base 75: mod_base = OTHER; note = 2'-O-methyl modified nucleotide
  modified_base 76: mod_base = OTHER; note = 2'-O-methyl modified nucleotide
  modified_base 77: mod_base = OTHER; note = 2'-O-methyl modified nucleotide
  modified_base 78: mod_base = OTHER; note = 2'-O-methyl modified nucleotide
  modified_base 79: mod_base = OTHER; note = 2'-O-methyl modified nucleotide
  modified_base 80: mod_base = OTHER; note = 2'-O-methyl modified nucleotide
  modified_base 81: mod_base = OTHER; note = 2'-O-methyl modified nucleotide
  modified_base 82: mod_base = OTHER; note = 2'-O-methyl modified nucleotide
  modified_base 83: mod_base = OTHER; note = 2'-O-methyl modified nucleotide
  modified_base 84: mod_base = OTHER; note = 2'-O-methyl modified nucleotide
  modified_base 85: mod_base = OTHER; note = 2'-O-methyl modified nucleotide
  modified_base 86: mod_base = OTHER; note = 2'-O-methyl modified nucleotide
  modified_base 87: mod_base = OTHER; note = 2'-O-methyl modified nucleotide
  modified_base 88: mod_base = OTHER; note = 2'-O-methyl modified nucleotide
  modified_base 89: mod_base = OTHER; note = 2'-O-methyl modified nucleotide
  modified_base 90: mod_base = OTHER; note = 2'-O-methyl modified nucleotide
  modified_base 91: mod_base = OTHER; note = 2'-O-methyl modified nucleotide
  modified_base 92: mod_base = OTHER; note = 2'-O-methyl modified nucleotide
  modified_base 93: mod_base = OTHER; note = 2'-O-methyl modified nucleotide
  modified_base 94: mod_base = OTHER; note = 2'-O-methyl modified nucleotide
  modified_base 95: mod_base = OTHER; note = 2'-O-methyl modified nucleotide
  modified_base 96: mod_base = OTHER; note = 2'-O-methyl modified nucleotide
  modified_base 115: mod_base = OTHER; note = Nucleotide with phosphorothioate linkage
  modified_base 116: mod_base = OTHER; note = 2'-O-methyl modified nucleotide with phosphorothioate linkage
  modified_base 117: mod_base = OTHER; note = 2'-O-methyl modified nucleotide with phosphorothioate linkage
  modified_base 118: mod_base = OTHER; note = 2'-O-methyl modified nucleotide
gctggtacacggcagggtcagttttagagctagaaatagcaagttaaaataaggctagtccgttatcaacttgaaaaagtggcaccgagtcggtgccagatatcctgaccctgccgtg

SEQ ID NO: 16731 - RNA, 117 nt, synthetic construct
  source 1..117: mol_type = other RNA
  modified_base 1: mod_base = OTHER; note = 2'-O-methyl modified nucleotide with phosphorothioate linkage
  modified_base 2: mod_base = OTHER; note = 2'-O-methyl modified nucleotide with phosphorothioate linkage
  modified_base 3: mod_base = OTHER; note = 2'-O-methyl modified nucleotide with phosphorothioate linkage
  modified_base 29: mod_base = OTHER; note = 2'-O-methyl modified nucleotide
  modified_base 30: mod_base = OTHER; note = 2'-O-methyl modified nucleotide
  modified_base 31: mod_base = OTHER; note = 2'-O-methyl modified nucleotide
  modified_base 32: mod_base = OTHER; note = 2'-O-methyl modified nucleotide
  modified_base 33: mod_base = OTHER; note = 2'-O-methyl modified nucleotide
  modified_base 34: mod_base = OTHER; note = 2'-O-methyl modified nucleotide
  modified_base 35: mod_base = OTHER; note = 2'-O-methyl modified nucleotide
  modified_base 36: mod_base = OTHER; note = 2'-O-methyl modified nucleotide
  modified_base 37: mod_base = OTHER; note = 2'-O-methyl modified nucleotide
  modified_base 38: mod_base = OTHER; note = 2'-O-methyl modified nucleotide
  modified_base 39: mod_base = OTHER; note = 2'-O-methyl modified nucleotide
  modified_base 40: mod_base = OTHER; note = 2'-O-methyl modified nucleotide
  modified_base 69: mod_base = OTHER; note = 2'-O-methyl modified nucleotide
  modified_base 70: mod_base = OTHER; note = 2'-O-methyl modified nucleotide
  modified_base 71: mod_base = OTHER; note = 2'-O-methyl modified nucleotide
  modified_base 72: mod_base = OTHER; note = 2'-O-methyl modified nucleotide
  modified_base 73: mod_base = OTHER; note = 2'-O-methyl modified nucleotide
  modified_base 74: mod_base = OTHER; note = 2'-O-methyl modified nucleotide
  modified_base 75: mod_base = OTHER; note = 2'-O-methyl modified nucleotide
  modified_base 76: mod_base = OTHER; note = 2'-O-methyl modified nucleotide
  modified_base 77: mod_base = OTHER; note = 2'-O-methyl modified nucleotide
  modified_base 78: mod_base = OTHER; note = 2'-O-methyl modified nucleotide
  modified_base 79: mod_base = OTHER; note = 2'-O-methyl modified nucleotide
  modified_base 80: mod_base = OTHER; note = 2'-O-methyl modified nucleotide
  modified_base 81: mod_base = OTHER; note = 2'-O-methyl modified nucleotide
  modified_base 82: mod_base = OTHER; note = 2'-O-methyl modified nucleotide
  modified_base 83: mod_base = OTHER; note = 2'-O-methyl modified nucleotide
  modified_base 84: mod_base = OTHER; note = 2'-O-methyl modified nucleotide
  modified_base 85: mod_base = OTHER; note = 2'-O-methyl modified nucleotide
  modified_base 86: mod_base = OTHER; note = 2'-O-methyl modified nucleotide
  modified_base 87: mod_base = OTHER; note = 2'-O-methyl modified nucleotide
  modified_base 88: mod_base = OTHER; note = 2'-O-methyl modified nucleotide
  modified_base 89: mod_base = OTHER; note = 2'-O-methyl modified nucleotide
  modified_base 90: mod_base = OTHER; note = 2'-O-methyl modified nucleotide
  modified_base 91: mod_base = OTHER; note = 2'-O-methyl modified nucleotide
  modified_base 92: mod_base = OTHER; note = 2'-O-methyl modified nucleotide
  modified_base 93: mod_base = OTHER; note = 2'-O-methyl modified nucleotide
  modified_base 94: mod_base = OTHER; note = 2'-O-methyl modified nucleotide
  modified_base 95: mod_base = OTHER; note = 2'-O-methyl modified nucleotide
  modified_base 96: mod_base = OTHER; note = 2'-O-methyl modified nucleotide
  modified_base 114: mod_base = OTHER; note = Nucleotide with phosphorothioate linkage
  modified_base 115: mod_base = OTHER; note = 2'-O-methyl modified nucleotide with phosphorothioate linkage
  modified_base 116: mod_base = OTHER; note = 2'-O-methyl modified nucleotide with phosphorothioate linkage
  modified_base 117: mod_base = OTHER; note = 2'-O-methyl modified nucleotide
gctggtacacggcagggtcagttttagagctagaaatagcaagttaaaataaggctagtccgttatcaacttgaaaaagtggcaccgagtcggtgccagatatcctgaccctgccgt

SEQ ID NO: 16732 - RNA, 116 nt, synthetic construct
  source 1..116: mol_type = other RNA
  modified_base 1: mod_base = OTHER; note = 2'-O-methyl modified nucleotide with phosphorothioate linkage
  modified_base 2: mod_base = OTHER; note = 2'-O-methyl modified nucleotide with phosphorothioate linkage
  modified_base 3: mod_base = OTHER; note = 2'-O-methyl modified nucleotide with phosphorothioate linkage
  modified_base 29: mod_base = OTHER; note = 2'-O-methyl modified nucleotide
  modified_base 30: mod_base = OTHER; note = 2'-O-methyl modified nucleotide
  modified_base 31: mod_base = OTHER; note = 2'-O-methyl modified nucleotide
  modified_base 32: mod_base = OTHER; note = 2'-O-methyl modified nucleotide
  modified_base 33: mod_base = OTHER; note = 2'-O-methyl modified nucleotide
  modified_base 34: mod_base = OTHER; note = 2'-O-methyl modified nucleotide
  modified_base 35: mod_base = OTHER; note = 2'-O-methyl modified nucleotide
  modified_base 36: mod_base = OTHER; note = 2'-O-methyl modified nucleotide
  modified_base 37: mod_base = OTHER; note = 2'-O-methyl modified nucleotide
  modified_base 38: mod_base = OTHER; note = 2'-O-methyl modified nucleotide
  modified_base 39: mod_base = OTHER; note = 2'-O-methyl modified nucleotide
  modified_base 40: mod_base = OTHER; note = 2'-O-methyl modified nucleotide
  modified_base 69: mod_base = OTHER; note = 2'-O-methyl modified nucleotide
  modified_base 70: mod_base = OTHER; note = 2'-O-methyl modified nucleotide
  modified_base 71: mod_base = OTHER; note = 2'-O-methyl modified nucleotide
  modified_base 72: mod_base = OTHER; note = 2'-O-methyl modified nucleotide
  modified_base 73: mod_base = OTHER; note = 2'-O-methyl modified nucleotide
  modified_base 74: mod_base = OTHER; note = 2'-O-methyl modified nucleotide
  modified_base 75: mod_base = OTHER; note = 2'-O-methyl modified nucleotide
  modified_base 76: mod_base = OTHER; note = 2'-O-methyl modified nucleotide
  modified_base 77: mod_base = OTHER; note = 2'-O-methyl modified nucleotide
  modified_base 78: mod_base = OTHER; note = 2'-O-methyl modified nucleotide
  modified_base 79: mod_base = OTHER; note = 2'-O-methyl modified nucleotide
  modified_base 80: mod_base = OTHER; note = 2'-O-methyl modified nucleotide
  modified_base 81: mod_base = OTHER; note = 2'-O-methyl modified nucleotide
  modified_base 82: mod_base = OTHER; note = 2'-O-methyl modified nucleotide
  modified_base 83: mod_base = OTHER; note = 2'-O-methyl modified nucleotide
  modified_base 84: mod_base = OTHER; note = 2'-O-methyl modified nucleotide
  modified_base 85: mod_base = OTHER; note = 2'-O-methyl modified nucleotide
  modified_base 86: mod_base = OTHER; note = 2'-O-methyl modified nucleotide
  modified_base 87: mod_base = OTHER; note = 2'-O-methyl modified nucleotide
  modified_base 88: mod_base = OTHER; note = 2'-O-methyl modified nucleotide
  modified_base 89: mod_base = OTHER; note = 2'-O-methyl modified nucleotide
  modified_base 90: mod_base = OTHER; note = 2'-O-methyl modified nucleotide
  modified_base 91: mod_base = OTHER; note = 2'-O-methyl modified nucleotide
  modified_base 92: mod_base = OTHER; note = 2'-O-methyl modified nucleotide
  modified_base 93: mod_base = OTHER; note = 2'-O-methyl modified nucleotide
  modified_base 94: mod_base = OTHER; note = 2'-O-methyl modified nucleotide
  modified_base 95: mod_base = OTHER; note = 2'-O-methyl modified nucleotide
  modified_base 96: mod_base = OTHER; note = 2'-O-methyl modified nucleotide
  modified_base 113: mod_base = OTHER; note = Nucleotide with phosphorothioate linkage
  modified_base 114: mod_base = OTHER; note = 2'-O-methyl modified nucleotide with phosphorothioate linkage
  modified_base 115: mod_base = OTHER; note = 2'-O-methyl modified nucleotide with phosphorothioate linkage
  modified_base 116: mod_base = OTHER; note = 2'-O-methyl modified nucleotide
gctggtacacggcagggtcagttttagagctagaaatagcaagttaaaataaggctagtccgttatcaacttgaaaaagtggcaccgagtcggtgccagatatcctgaccctgccg

SEQ ID NO: 16733 - RNA, 123 nt, synthetic construct
  source 1..123: mol_type = other RNA
  modified_base 1: mod_base = OTHER; note = 2'-O-methyl modified nucleotide with phosphorothioate linkage
  modified_base 2: mod_base = OTHER; note = 2'-O-methyl modified nucleotide with phosphorothioate linkage
  modified_base 3: mod_base = OTHER; note = 2'-O-methyl modified nucleotide with phosphorothioate linkage
  modified_base 29: mod_base = OTHER; note = 2'-O-methyl modified nucleotide
  modified_base 30: mod_base = OTHER; note = 2'-O-methyl modified nucleotide
  modified_base 31: mod_base = OTHER; note = 2'-O-methyl modified nucleotide
  modified_base 32: mod_base = OTHER; note = 2'-O-methyl modified nucleotide
  modified_base 33: mod_base = OTHER; note = 2'-O-methyl modified nucleotide
  modified_base 34: mod_base = OTHER; note = 2'-O-methyl modified nucleotide
  modified_base 35: mod_base = OTHER; note = 2'-O-methyl modified nucleotide
  modified_base 36: mod_base = OTHER; note = 2'-O-methyl modified nucleotide
  modified_base 37: mod_base = OTHER; note = 2'-O-methyl modified nucleotide
  modified_base 38: mod_base = OTHER; note = 2'-O-methyl modified nucleotide
  modified_base 39: mod_base = OTHER; note = 2'-O-methyl modified nucleotide
  modified_base 40: mod_base = OTHER; note = 2'-O-methyl modified nucleotide
  modified_base 69: mod_base = OTHER; note = 2'-O-methyl modified nucleotide
  modified_base 70: mod_base = OTHER; note = 2'-O-methyl modified nucleotide
  modified_base 71: mod_base = OTHER; note = 2'-O-methyl modified nucleotide
  modified_base 72: mod_base = OTHER; note = 2'-O-methyl modified nucleotide
  modified_base 73: mod_base = OTHER; note = 2'-O-methyl modified nucleotide
  modified_base 74: mod_base = OTHER; note = 2'-O-methyl modified nucleotide
  modified_base 75: mod_base = OTHER; note = 2'-O-methyl modified nucleotide
  modified_base 76: mod_base = OTHER; note = 2'-O-methyl modified nucleotide
  modified_base 77: mod_base = OTHER; note = 2'-O-methyl modified nucleotide
  modified_base 78: mod_base = OTHER; note = 2'-O-methyl modified nucleotide
  modified_base 79: mod_base = OTHER; note = 2'-O-methyl modified nucleotide
  modified_base 80: mod_base = OTHER; note = 2'-O-methyl modified nucleotide
  modified_base 81: mod_base = OTHER; note = 2'-O-methyl modified nucleotide
  modified_base 82: mod_base = OTHER; note = 2'-O-methyl modified nucleotide
  modified_base 83: mod_base = OTHER; note = 2'-O-methyl modified nucleotide
  modified_base 84: mod_base = OTHER; note = 2'-O-methyl modified nucleotide
  modified_base 85: mod_base = OTHER; note = 2'-O-methyl modified nucleotide
  modified_base 86: mod_base = OTHER; note = 2'-O-methyl modified nucleotide
  modified_base 87: mod_base = OTHER; note = 2'-O-methyl modified nucleotide
  modified_base 88: mod_base = OTHER; note = 2'-O-methyl modified nucleotide
  modified_base 89: mod_base = OTHER; note = 2'-O-methyl modified nucleotide
  modified_base 90: mod_base = OTHER; note = 2'-O-methyl modified nucleotide
  modified_base 91: mod_base = OTHER; note = 2'-O-methyl modified nucleotide
  modified_base 92: mod_base = OTHER; note = 2'-O-methyl modified nucleotide
  modified_base 93: mod_base = OTHER; note = 2'-O-methyl modified nucleotide
  modified_base 94: mod_base = OTHER; note = 2'-O-methyl modified nucleotide
  modified_base 95: mod_base = OTHER; note = 2'-O-methyl modified nucleotide
  modified_base 96: mod_base = OTHER; note = 2'-O-methyl modified nucleotide
  modified_base 120: mod_base = OTHER; note = Nucleotide with phosphorothioate linkage
  modified_base 121: mod_base = OTHER; note = 2'-O-methyl modified nucleotide with phosphorothioate linkage
  modified_base 122: mod_base = OTHER; note = 2'-O-methyl modified nucleotide with phosphorothioate linkage
  modified_base 123: mod_base = OTHER; note = 2'-O-methyl modified nucleotide
gctggtacacggcagggtcagttttagagctagaaatagcaagttaaaataaggctagtccgttatcaacttgaaaaagtggcaccgagtcggtgccacagatatcctgaccctgccgtgtac

SEQ ID NO: 16734 - RNA, 122 nt, synthetic construct
  source 1..122: mol_type = other RNA
  modified_base 1: mod_base = OTHER; note = 2'-O-methyl modified nucleotide with phosphorothioate linkage
  modified_base 2: mod_base = OTHER; note = 2'-O-methyl modified nucleotide with phosphorothioate linkage
  modified_base 3: mod_base = OTHER; note = 2'-O-methyl modified nucleotide with phosphorothioate linkage
  modified_base 29: mod_base = OTHER; note = 2'-O-methyl modified nucleotide
  modified_base 30: mod_base = OTHER; note = 2'-O-methyl modified nucleotide
  modified_base 31: mod_base = OTHER; note = 2'-O-methyl modified nucleotide
  modified_base 32: mod_base = OTHER; note = 2'-O-methyl modified nucleotide
  modified_base 33: mod_base = OTHER; note = 2'-O-methyl modified nucleotide
  modified_base 34: mod_base = OTHER; note = 2'-O-methyl modified nucleotide
  modified_base 35: mod_base = OTHER; note = 2'-O-methyl modified nucleotide
  modified_base 36: mod_base = OTHER; note = 2'-O-methyl modified nucleotide
  modified_base 37: mod_base = OTHER; note = 2'-O-methyl modified nucleotide
  modified_base 38: mod_base = OTHER; note = 2'-O-methyl modified nucleotide
  modified_base 39: mod_base = OTHER; note = 2'-O-methyl modified nucleotide
  modified_base 40: mod_base = OTHER; note = 2'-O-methyl modified nucleotide
  modified_base 69: mod_base = OTHER; note = 2'-O-methyl modified nucleotide
  modified_base 70: mod_base = OTHER; note = 2'-O-methyl modified nucleotide
  modified_base 71: mod_base = OTHER; note = 2'-O-methyl modified nucleotide
  modified_base 72: mod_base = OTHER; note = 2'-O-methyl modified nucleotide
  modified_base 73: mod_base = OTHER; note = 2'-O-methyl modified nucleotide
  modified_base 74: mod_base = OTHER; note = 2'-O-methyl modified nucleotide
  modified_base 75: mod_base = OTHER; note = 2'-O-methyl modified nucleotide
  modified_base 76: mod_base = OTHER; note = 2'-O-methyl modified nucleotide
  modified_base 77: mod_base = OTHER; note = 2'-O-methyl modified nucleotide
  modified_base 78: mod_base = OTHER; note = 2'-O-methyl modified nucleotide
  modified_base 79: mod_base = OTHER; note = 2'-O-methyl modified nucleotide
  modified_base 80: mod_base = OTHER; note = 2'-O-methyl modified nucleotide
  modified_base 81: mod_base = OTHER; note = 2'-O-methyl modified nucleotide
  modified_base 82: mod_base = OTHER; note = 2'-O-methyl modified nucleotide
  modified_base 83: mod_base = OTHER; note = 2'-O-methyl modified nucleotide
  modified_base 84: mod_base = OTHER; note = 2'-O-methyl modified nucleotide
  modified_base 85: mod_base = OTHER; note = 2'-O-methyl modified nucleotide
  modified_base 86: mod_base = OTHER; note = 2'-O-methyl modified nucleotide
  modified_base 87: mod_base = OTHER; note = 2'-O-methyl modified nucleotide
  modified_base 88: mod_base = OTHER; note = 2'-O-methyl modified nucleotide
  modified_base 89: mod_base = OTHER; note = 2'-O-methyl modified nucleotide
  modified_base 90: mod_base = OTHER; note = 2'-O-methyl modified nucleotide
  modified_base 91: mod_base = OTHER; note = 2'-O-methyl modified nucleotide
  modified_base 92: mod_base = OTHER; note = 2'-O-methyl modified nucleotide
  modified_base 93: mod_base = OTHER; note = 2'-O-methyl modified nucleotide
  modified_base 94: mod_base = OTHER; note = 2'-O-methyl modified nucleotide
  modified_base 95: mod_base = OTHER; note = 2'-O-methyl modified nucleotide
  modified_base 96: mod_base = OTHER; note = 2'-O-methyl modified nucleotide
  modified_base 119: mod_base = OTHER; note = Nucleotide with phosphorothioate linkage
  modified_base 120: mod_base = OTHER; note = 2'-O-methyl modified nucleotide with phosphorothioate linkage
  modified_base 121: mod_base = OTHER; note = 2'-O-methyl modified nucleotide with phosphorothioate linkage
  modified_base 122: mod_base = OTHER; note = 2'-O-methyl modified nucleotide
gctggtacacggcagggtcagttttagagctagaaatagcaagttaaaataaggctagtccgttatcaacttgaaaaagtggcaccgagtcggtgccacagatatcctgaccctgccgtgta

SEQ ID NO: 16735 - RNA, 121 nt, synthetic construct
  source 1..121: mol_type = other RNA
  modified_base 1: mod_base = OTHER; note = 2'-O-methyl modified nucleotide with phosphorothioate linkage
  modified_base 2: mod_base = OTHER; note = 2'-O-methyl modified nucleotide with phosphorothioate linkage
  modified_base 3: mod_base = OTHER; note = 2'-O-methyl modified nucleotide with phosphorothioate linkage
  modified_base 29: mod_base = OTHER; note = 2'-O-methyl modified nucleotide
  modified_base 30: mod_base = OTHER; note = 2'-O-methyl modified nucleotide
  modified_base 31: mod_base = OTHER; note = 2'-O-methyl modified nucleotide
  modified_base 32: mod_base = OTHER; note = 2'-O-methyl modified nucleotide
  modified_base 33: mod_base = OTHER; note = 2'-O-methyl modified nucleotide
  modified_base 34: mod_base = OTHER; note = 2'-O-methyl modified nucleotide
  modified_base 35: mod_base = OTHER; note = 2'-O-methyl modified nucleotide
  modified_base 36: mod_base = OTHER; note = 2'-O-methyl modified nucleotide
  modified_base 37: mod_base = OTHER; note = 2'-O-methyl modified nucleotide
  modified_base 38: mod_base = OTHER; note = 2'-O-methyl modified nucleotide
  modified_base 39: mod_base = OTHER; note = 2'-O-methyl modified nucleotide
  modified_base 40: mod_base = OTHER; note = 2'-O-methyl modified nucleotide
  modified_base 69: mod_base = OTHER; note = 2'-O-methyl modified nucleotide
  modified_base 70: mod_base = OTHER; note = 2'-O-methyl modified nucleotide
  modified_base 71: mod_base = OTHER; note = 2'-O-methyl modified nucleotide
  modified_base 72: mod_base = OTHER; note = 2'-O-methyl modified nucleotide
  modified_base 73: mod_base = OTHER; note = 2'-O-methyl modified nucleotide
  modified_base 74: mod_base = OTHER; note = 2'-O-methyl modified nucleotide
  modified_base 75: mod_base = OTHER; note = 2'-O-methyl modified nucleotide
  modified_base 76: mod_base = OTHER; note = 2'-O-methyl modified nucleotide
  modified_base 77: mod_base = OTHER; note = 2'-O-methyl modified nucleotide
  modified_base 78: mod_base = OTHER; note = 2'-O-methyl modified nucleotide
  modified_base 79: mod_base = OTHER; note = 2'-O-methyl modified nucleotide
  modified_base 80: mod_base = OTHER; note = 2'-O-methyl modified nucleotide
  modified_base 81: mod_base = OTHER; note = 2'-O-methyl modified nucleotide
  modified_base 82: mod_base = OTHER; note = 2'-O-methyl modified nucleotide
  modified_base 83: mod_base = OTHER; note = 2'-O-methyl modified nucleotide
  modified_base 84: mod_base = OTHER; note = 2'-O-methyl modified nucleotide
  modified_base 85: mod_base = OTHER; note = 2'-O-methyl modified nucleotide
  modified_base 86: mod_base = OTHER; note = 2'-O-methyl modified nucleotide
  modified_base 87: mod_base = OTHER; note = 2'-O-methyl modified nucleotide
  modified_base 88: mod_base = OTHER; note = 2'-O-methyl modified nucleotide
  modified_base 89: mod_base = OTHER; note = 2'-O-methyl modified nucleotide
  modified_base 90: mod_base = OTHER; note = 2'-O-methyl modified nucleotide
  modified_base 91: mod_base = OTHER; note = 2'-O-methyl modified nucleotide
  modified_base 92: mod_base = OTHER; note = 2'-O-methyl modified nucleotide
  modified_base 93: mod_base = OTHER; note = 2'-O-methyl modified nucleotide
  modified_base 94: mod_base = OTHER; note = 2'-O-methyl modified nucleotide
  modified_base 95: mod_base = OTHER; note = 2'-O-methyl modified nucleotide
  modified_base 96: mod_base = OTHER; note = 2'-O-methyl modified nucleotide
  modified_base 118: mod_base = OTHER; note = Nucleotide with phosphorothioate linkage
  modified_base 119: mod_base = OTHER; note = 2'-O-methyl modified nucleotide with phosphorothioate linkage
  modified_base 120: mod_base = OTHER; note = 2'-O-methyl modified nucleotide with phosphorothioate linkage
  modified_base 121: mod_base = OTHER; note = 2'-O-methyl modified nucleotide
gctggtacacggcagggtcagttttagagctagaaatagcaagttaaaataaggctagtccgttatcaacttgaaaaagtggcaccgagtcggtgccacagatatcctgaccctgccgtgt

SEQ ID NO: 16736 - RNA, 120 nt, synthetic construct
  source 1..120: mol_type = other RNA
  modified_base 1: mod_base = OTHER; note = 2'-O-methyl modified nucleotide with phosphorothioate linkage
  modified_base 2: mod_base = OTHER; note = 2'-O-methyl modified nucleotide with phosphorothioate linkage
  modified_base 3: mod_base = OTHER; note = 2'-O-methyl modified nucleotide with phosphorothioate linkage
  modified_base 29: mod_base = OTHER; note = 2'-O-methyl modified nucleotide
  modified_base 30: mod_base = OTHER; note = 2'-O-methyl modified nucleotide
  modified_base 31: mod_base = OTHER; note = 2'-O-methyl modified nucleotide
  modified_base 32: mod_base = OTHER; note = 2'-O-methyl modified nucleotide
  modified_base 33: mod_base = OTHER; note = 2'-O-methyl modified nucleotide
  modified_base 34: mod_base = OTHER; note = 2'-O-methyl modified nucleotide
  modified_base 35: mod_base = OTHER; note = 2'-O-methyl modified nucleotide
  modified_base 36: mod_base = OTHER; note = 2'-O-methyl modified nucleotide
  modified_base 37: mod_base = OTHER; note = 2'-O-methyl modified nucleotide
  modified_base 38: mod_base = OTHER; note = 2'-O-methyl modified nucleotide
  modified_base 39: mod_base = OTHER; note = 2'-O-methyl modified nucleotide
  modified_base 40: mod_base = OTHER; note = 2'-O-methyl modified nucleotide
  modified_base 69: mod_base = OTHER; note = 2'-O-methyl modified nucleotide
  modified_base 70: mod_base = OTHER; note = 2'-O-methyl modified nucleotide
  modified_base 71: mod_base = OTHER; note = 2'-O-methyl modified nucleotide
  modified_base 72: mod_base = OTHER; note = 2'-O-methyl modified nucleotide
  modified_base 73: mod_base = OTHER; note = 2'-O-methyl modified nucleotide
  modified_base 74: mod_base = OTHER; note = 2'-O-methyl modified nucleotide
  modified_base 75: mod_base = OTHER; note = 2'-O-methyl modified nucleotide
  modified_base 76: mod_base = OTHER; note = 2'-O-methyl modified nucleotide
  modified_base 77: mod_base = OTHER; note = 2'-O-methyl modified nucleotide
  modified_base 78: mod_base = OTHER; note = 2'-O-methyl modified nucleotide
  modified_base 79: mod_base = OTHER; note = 2'-O-methyl modified nucleotide
  modified_base 80: mod_base = OTHER; note = 2'-O-methyl modified nucleotide
  modified_base 81: mod_base = OTHER; note = 2'-O-methyl modified nucleotide
  modified_base 82: mod_base = OTHER; note = 2'-O-methyl modified nucleotide
  modified_base 83: mod_base = OTHER; note = 2'-O-methyl modified nucleotide
  modified_base 84: mod_base = OTHER; note = 2'-O-methyl modified nucleotide
  modified_base 85: mod_base = OTHER; note = 2'-O-methyl modified nucleotide
  modified_base 86: mod_base = OTHER; note = 2'-O-methyl modified nucleotide
  modified_base 87: mod_base = OTHER; note = 2'-O-methyl modified nucleotide
  modified_base 88: mod_base = OTHER; note = 2'-O-methyl modified nucleotide
  modified_base 89: mod_base = OTHER; note = 2'-O-methyl modified nucleotide
  modified_base 90: mod_base = OTHER; note = 2'-O-methyl modified nucleotide
  modified_base 91: mod_base = OTHER; note = 2'-O-methyl modified nucleotide
  modified_base 92: mod_base = OTHER; note = 2'-O-methyl modified nucleotide
  modified_base 93: mod_base = OTHER; note = 2'-O-methyl modified nucleotide
  modified_base 94: mod_base = OTHER; note = 2'-O-methyl modified nucleotide
  modified_base 95: mod_base = OTHER; note = 2'-O-methyl modified nucleotide
  modified_base 96: mod_base = OTHER; note = 2'-O-methyl modified nucleotide
  modified_base 117: mod_base = OTHER; note = Nucleotide with phosphorothioate linkage
  modified_base 118: mod_base = OTHER; note = 2'-O-methyl modified nucleotide with phosphorothioate linkage
  modified_base 119: mod_base = OTHER; note = 2'-O-methyl modified nucleotide with phosphorothioate linkage
  modified_base 120: mod_base = OTHER; note = 2'-O-methyl modified nucleotide
gctggtacacggcagggtcagttttagagctagaaatagcaagttaaaataaggctagtccgttatcaacttgaaaaagtggcaccgagtcggtgccacagatatcctgaccctgccgtg

SEQ ID NO: 16737 - RNA, 119 nt, synthetic construct
  source 1..119: mol_type = other RNA
  modified_base 1: mod_base = OTHER; note = 2'-O-methyl modified nucleotide with phosphorothioate linkage
  modified_base 2: mod_base = OTHER; note = 2'-O-methyl modified nucleotide with phosphorothioate linkage
  modified_base 3: mod_base = OTHER; note = 2'-O-methyl modified nucleotide with phosphorothioate linkage
  modified_base 29: mod_base = OTHER; note = 2'-O-methyl modified nucleotide
  modified_base 30: mod_base = OTHER; note = 2'-O-methyl modified nucleotide
  modified_base 31: mod_base = OTHER; note = 2'-O-methyl modified nucleotide
  modified_base 32: mod_base = OTHER; note = 2'-O-methyl modified nucleotide
  modified_base 33: mod_base = OTHER; note = 2'-O-methyl modified nucleotide
  modified_base 34: mod_base = OTHER; note = 2'-O-methyl modified nucleotide
  modified_base 35: mod_base = OTHER; note = 2'-O-methyl modified nucleotide
  modified_base 36: mod_base = OTHER; note = 2'-O-methyl modified nucleotide
  modified_base 37: mod_base = OTHER; note = 2'-O-methyl modified nucleotide
  modified_base 38: mod_base = OTHER; note = 2'-O-methyl modified nucleotide
  modified_base 39: mod_base = OTHER; note = 2'-O-methyl modified nucleotide
  modified_base 40: mod_base = OTHER; note = 2'-O-methyl modified nucleotide
  modified_base 69: mod_base = OTHER; note = 2'-O-methyl modified nucleotide
  modified_base 70: mod_base = OTHER; note = 2'-O-methyl modified nucleotide
  modified_base 71: mod_base = OTHER; note = 2'-O-methyl modified nucleotide
  modified_base 72: mod_base = OTHER; note = 2'-O-methyl modified nucleotide
  modified_base 73: mod_base = OTHER; note = 2'-O-methyl modified nucleotide
  modified_base 74: mod_base = OTHER; note = 2'-O-methyl modified nucleotide
  modified_base 75: mod_base = OTHER; note = 2'-O-methyl modified nucleotide
  modified_base 76: mod_base = OTHER; note = 2'-O-methyl modified nucleotide
  modified_base 77: mod_base = OTHER; note = 2'-O-methyl modified nucleotide
  modified_base 78: mod_base = OTHER; note = 2'-O-methyl modified nucleotide
  modified_base 79: mod_base = OTHER; note = 2'-O-methyl modified nucleotide
  modified_base 80: mod_base = OTHER; note = 2'-O-methyl modified nucleotide
  modified_base 81: mod_base = OTHER; note = 2'-O-methyl modified nucleotide
  modified_base 82: mod_base = OTHER; note = 2'-O-methyl modified nucleotide
  modified_base 83: mod_base = OTHER; note = 2'-O-methyl modified nucleotide
  modified_base 84: mod_base = OTHER; note = 2'-O-methyl modified nucleotide
  modified_base 85: mod_base = OTHER; note = 2'-O-methyl modified nucleotide
  modified_base 86: mod_base = OTHER; note = 2'-O-methyl modified nucleotide
  modified_base 87: mod_base = OTHER; note = 2'-O-methyl modified nucleotide
  modified_base 88: mod_base = OTHER; note = 2'-O-methyl modified nucleotide
  modified_base 89: mod_base = OTHER; note = 2'-O-methyl modified nucleotide
  modified_base 90: mod_base = OTHER; note = 2'-O-methyl modified nucleotide
  modified_base 91: mod_base = OTHER; note = 2'-O-methyl modified nucleotide
  modified_base 92: mod_base = OTHER; note = 2'-O-methyl modified nucleotide
  modified_base 93: mod_base = OTHER; note = 2'-O-methyl modified nucleotide
  modified_base 94: mod_base = OTHER; note = 2'-O-methyl modified nucleotide
  modified_base 95: mod_base = OTHER; note = 2'-O-methyl modified nucleotide
  modified_base 96: mod_base = OTHER; note = 2'-O-methyl modified nucleotide
  modified_base 116: mod_base = OTHER; note = Nucleotide with phosphorothioate linkage
  modified_base 117: mod_base = OTHER; note = 2'-O-methyl modified nucleotide with phosphorothioate linkage
  modified_base 118: mod_base = OTHER; note = 2'-O-methyl modified nucleotide with phosphorothioate linkage
  modified_base 119: mod_base = OTHER; note = 2'-O-methyl modified nucleotide
gctggtacacggcagggtcagttttagagctagaaatagcaagttaaaataaggctagtccgttatcaacttgaaaaagtggcaccgagtcggtgccacagatatcctgaccctgccgt

SEQ ID NO: 16738 - RNA, 118 nt, synthetic construct
  source 1..118: mol_type = other RNA
  modified_base 1: mod_base = OTHER; note = 2'-O-methyl modified nucleotide with phosphorothioate linkage
  modified_base 2: mod_base = OTHER; note = 2'-O-methyl modified nucleotide with phosphorothioate linkage
  modified_base 3: mod_base = OTHER; note = 2'-O-methyl modified nucleotide with phosphorothioate linkage
  modified_base 29: mod_base = OTHER; note = 2'-O-methyl modified nucleotide
  modified_base 30: mod_base = OTHER; note = 2'-O-methyl modified nucleotide
  modified_base 31: mod_base = OTHER; note = 2'-O-methyl modified nucleotide
  modified_base 32: mod_base = OTHER; note = 2'-O-methyl modified nucleotide
  modified_base 33: mod_base = OTHER; note = 2'-O-methyl modified nucleotide
  modified_base 34: mod_base = OTHER; note = 2'-O-methyl modified nucleotide
  modified_base 35: mod_base = OTHER; note = 2'-O-methyl modified nucleotide
  modified_base 36: mod_base = OTHER; note = 2'-O-methyl modified nucleotide
  modified_base 37: mod_base = OTHER; note = 2'-O-methyl modified nucleotide
  modified_base 38: mod_base = OTHER; note = 2'-O-methyl modified nucleotide
  modified_base 39: mod_base = OTHER; note = 2'-O-methyl modified nucleotide
  modified_base 40: mod_base = OTHER; note = 2'-O-methyl modified nucleotide
  modified_base 69: mod_base = OTHER; note = 2'-O-methyl modified nucleotide
  modified_base 70: mod_base = OTHER; note = 2'-O-methyl modified nucleotide
  modified_base 71: mod_base = OTHER; note = 2'-O-methyl modified nucleotide
  modified_base 72: mod_base = OTHER; note = 2'-O-methyl modified nucleotide
  modified_base 73: mod_base = OTHER; note = 2'-O-methyl modified nucleotide
  modified_base 74: mod_base = OTHER; note = 2'-O-methyl modified nucleotide
  modified_base 75: mod_base = OTHER; note = 2'-O-methyl modified nucleotide
  modified_base 76: mod_base = OTHER; note = 2'-O-methyl modified nucleotide
  modified_base 77: mod_base = OTHER; note = 2'-O-methyl modified nucleotide
  modified_base 78: mod_base = OTHER; note = 2'-O-methyl modified nucleotide
  modified_base 79: mod_base = OTHER; note = 2'-O-methyl modified nucleotide
  modified_base 80: mod_base = OTHER; note = 2'-O-methyl modified nucleotide
  modified_base 81: mod_base = OTHER; note = 2'-O-methyl modified nucleotide
  modified_base 82: mod_base = OTHER; note = 2'-O-methyl modified nucleotide
  modified_base 83: mod_base = OTHER; note = 2'-O-methyl modified nucleotide
  modified_base 84: mod_base = OTHER; note = 2'-O-methyl modified nucleotide
  modified_base 85: mod_base = OTHER; note = 2'-O-methyl modified nucleotide
  modified_base 86: mod_base = OTHER; note = 2'-O-methyl modified nucleotide
  modified_base 87: mod_base = OTHER; note = 2'-O-methyl modified nucleotide
  modified_base 88: mod_base = OTHER; note = 2'-O-methyl modified nucleotide
  modified_base 89: mod_base = OTHER; note = 2'-O-methyl modified nucleotide
  modified_base 90: mod_base = OTHER; note = 2'-O-methyl modified nucleotide
  modified_base 91: mod_base = OTHER; note = 2'-O-methyl modified nucleotide
  modified_base 92: mod_base = OTHER; note = 2'-O-methyl modified nucleotide
  modified_base 93: mod_base = OTHER; note = 2'-O-methyl modified nucleotide
  modified_base 94: mod_base = OTHER; note = 2'-O-methyl modified nucleotide
  modified_base 95: mod_base = OTHER; note = 2'-O-methyl modified nucleotide
  modified_base 96: mod_base = OTHER; note = 2'-O-methyl modified nucleotide
  modified_base 115: mod_base = OTHER; note = Nucleotide with phosphorothioate linkage
  modified_base 116: mod_base = OTHER; note = 2'-O-methyl modified nucleotide with phosphorothioate linkage
  modified_base 117: mod_base = OTHER; note = 2'-O-methyl modified nucleotide with phosphorothioate linkage
  modified_base 118: mod_base = OTHER; note = 2'-O-methyl modified nucleotide
gctggtacacggcagggtcagttttagagctagaaatagcaagttaaaataaggctagtccgttatcaacttgaaaaagtggcaccgagtcggtgccacagatatcctgaccctgccg

SEQ ID NO: 16739 - RNA, 125 nt, synthetic construct
  source 1..125: mol_type = other RNA
  modified_base 1: mod_base = OTHER; note = 2'-O-methyl modified nucleotide with phosphorothioate linkage
  modified_base 2: mod_base = OTHER; note = 2'-O-methyl modified nucleotide with phosphorothioate linkage
  modified_base 3: mod_base = OTHER; note = 2'-O-methyl modified nucleotide with phosphorothioate linkage
  modified_base 29: mod_base = OTHER; note = 2'-O-methyl modified nucleotide
  modified_base 30: mod_base = OTHER; note = 2'-O-methyl modified nucleotide
  modified_base 31: mod_base = OTHER; note = 2'-O-methyl modified nucleotide
  modified_base 32: mod_base = OTHER; note = 2'-O-methyl modified nucleotide
  modified_base 33: mod_base = OTHER; note = 2'-O-methyl modified nucleotide
  modified_base 34: mod_base = OTHER; note = 2'-O-methyl modified nucleotide
  modified_base 35: mod_base = OTHER; note = 2'-O-methyl modified nucleotide
  modified_base 36: mod_base = OTHER; note = 2'-O-methyl modified nucleotide
  modified_base 37: mod_base = OTHER; note = 2'-O-methyl modified nucleotide
  modified_base 38: mod_base = OTHER; note = 2'-O-methyl modified nucleotide
  modified_base 39: mod_base = OTHER; note = 2'-O-methyl modified nucleotide
  modified_base 40: mod_base = OTHER; note = 2'-O-methyl modified nucleotide
  modified_base 69: mod_base = OTHER; note = 2'-O-methyl modified nucleotide
  modified_base 70: mod_base = OTHER; note = 2'-O-methyl modified nucleotide
  modified_base 71: mod_base = OTHER; note = 2'-O-methyl modified nucleotide
  modified_base 72: mod_base = OTHER; note = 2'-O-methyl modified nucleotide
  modified_base 73: mod_base = OTHER; note = 2'-O-methyl modified nucleotide
  modified_base 74: mod_base = OTHER; note = 2'-O-methyl modified nucleotide
  modified_base 75: mod_base = OTHER; note = 2'-O-methyl modified nucleotide
  modified_base 76: mod_base = OTHER; note = 2'-O-methyl modified nucleotide
  modified_base 77: mod_base = OTHER; note = 2'-O-methyl modified nucleotide
  modified_base 78: mod_base = OTHER; note = 2'-O-methyl modified nucleotide
  modified_base 79: mod_base = OTHER; note = 2'-O-methyl modified nucleotide
  modified_base 80: mod_base = OTHER; note = 2'-O-methyl modified nucleotide
  modified_base 81: mod_base = OTHER; note = 2'-O-methyl modified nucleotide
  modified_base 82: mod_base = OTHER; note = 2'-O-methyl modified nucleotide
  modified_base 83: mod_base = OTHER; note = 2'-O-methyl modified nucleotide
  modified_base 84: mod_base = OTHER; note = 2'-O-methyl modified nucleotide
  modified_base 85: mod_base = OTHER; note = 2'-O-methyl modified nucleotide
  modified_base 86: mod_base = OTHER; note = 2'-O-methyl modified nucleotide
  modified_base 87: mod_base = OTHER; note = 2'-O-methyl modified nucleotide
  modified_base 88: mod_base = OTHER; note = 2'-O-methyl modified nucleotide
  modified_base 89: mod_base = OTHER; note = 2'-O-methyl modified nucleotide
  modified_base 90: mod_base = OTHER; note = 2'-O-methyl modified nucleotide
  modified_base 91: mod_base = OTHER; note = 2'-O-methyl modified nucleotide
  modified_base 92: mod_base = OTHER; note = 2'-O-methyl modified nucleotide
  modified_base 93: mod_base = OTHER; note = 2'-O-methyl modified nucleotide
  modified_base 94: mod_base = OTHER; note = 2'-O-methyl modified nucleotide
  modified_base 95: mod_base = OTHER; note = 2'-O-methyl modified nucleotide
  modified_base 96: mod_base = OTHER; note = 2'-O-methyl modified nucleotide
  modified_base 122: mod_base = OTHER; note = Nucleotide with phosphorothioate linkage
  modified_base 123: mod_base = OTHER; note = 2'-O-methyl modified nucleotide with phosphorothioate linkage
  modified_base 124: mod_base = OTHER; note = 2'-O-methyl modified nucleotide with phosphorothioate linkage
  modified_base 125: mod_base = OTHER; note = 2'-O-methyl modified nucleotide
gctggtacacggcagggtcagttttagagctagaaatagcaagttaaaataaggctagtccgttatcaacttgaaaaagtggcaccgagtcggtgccccacagatatcctgaccctgccgtgtac

SEQ ID NO: 16740 - RNA, 124 nt, synthetic construct
  source 1..124: mol_type = other RNA
  modified_base 1: mod_base = OTHER; note = 2'-O-methyl modified nucleotide with phosphorothioate linkage
  modified_base 2: mod_base = OTHER; note = 2'-O-methyl modified nucleotide with phosphorothioate linkage
  modified_base 3: mod_base = OTHER; note = 2'-O-methyl modified nucleotide with phosphorothioate linkage
  modified_base 29: mod_base = OTHER; note = 2'-O-methyl modified nucleotide
  modified_base 30: mod_base = OTHER; note = 2'-O-methyl modified nucleotide
  modified_base 31: mod_base = OTHER; note = 2'-O-methyl modified nucleotide
  modified_base 32: mod_base = OTHER; note = 2'-O-methyl modified nucleotide
  modified_base 33: mod_base = OTHER; note = 2'-O-methyl modified nucleotide
  modified_base 34: mod_base = OTHER; note = 2'-O-methyl modified nucleotide
  modified_base 35: mod_base = OTHER; note = 2'-O-methyl modified nucleotide
  modified_base 36: mod_base = OTHER; note = 2'-O-methyl modified nucleotide
  modified_base 37: mod_base = OTHER; note = 2'-O-methyl modified nucleotide
  modified_base 38: mod_base = OTHER; note = 2'-O-methyl modified nucleotide
  modified_base 39: mod_base = OTHER; note = 2'-O-methyl modified nucleotide
  modified_base 40: mod_base = OTHER; note = 2'-O-methyl modified nucleotide
  modified_base 69: mod_base = OTHER; note = 2'-O-methyl modified nucleotide
  modified_base 70: mod_base = OTHER; note = 2'-O-methyl modified nucleotide
  modified_base 71: mod_base = OTHER; note = 2'-O-methyl modified nucleotide
  modified_base 72: mod_base = OTHER; note = 2'-O-methyl modified nucleotide
  modified_base 73: mod_base = OTHER; note = 2'-O-methyl modified nucleotide
  modified_base 74: mod_base = OTHER; note = 2'-O-methyl modified nucleotide
  modified_base 75: mod_base = OTHER; note = 2'-O-methyl modified nucleotide
  modified_base 76: mod_base = OTHER; note = 2'-O-methyl modified nucleotide
  modified_base 77: mod_base = OTHER; note = 2'-O-methyl modified nucleotide
  modified_base 78: mod_base = OTHER; note = 2'-O-methyl modified nucleotide
  modified_base 79: mod_base = OTHER; note = 2'-O-methyl modified nucleotide
  modified_base 80: mod_base = OTHER; note = 2'-O-methyl modified nucleotide
  modified_base 81: mod_base = OTHER; note = 2'-O-methyl modified nucleotide
  modified_base 82: mod_base = OTHER; note = 2'-O-methyl modified nucleotide
  modified_base 83: mod_base = OTHER; note = 2'-O-methyl modified nucleotide
  modified_base 84: mod_base = OTHER; note = 2'-O-methyl modified nucleotide
  modified_base 85: mod_base = OTHER; note = 2'-O-methyl modified nucleotide
  modified_base 86: mod_base = OTHER; note = 2'-O-methyl modified nucleotide
  modified_base 87: mod_base = OTHER; note = 2'-O-methyl modified nucleotide
  modified_base 88: mod_base = OTHER; note = 2'-O-methyl modified nucleotide
  modified_base 89: mod_base = OTHER; note = 2'-O-methyl modified nucleotide
  modified_base 90: mod_base = OTHER; note = 2'-O-methyl modified nucleotide
  modified_base 91: mod_base = OTHER; note = 2'-O-methyl modified nucleotide
  modified_base 92: mod_base = OTHER; note = 2'-O-methyl modified nucleotide
  modified_base 93: mod_base = OTHER; note = 2'-O-methyl modified nucleotide
  modified_base 94: mod_base = OTHER; note = 2'-O-methyl modified nucleotide
  modified_base 95: mod_base = OTHER; note = 2'-O-methyl modified nucleotide
  modified_base 96: mod_base = OTHER; note = 2'-O-methyl modified nucleotide
  modified_base 121: mod_base = OTHER; note = Nucleotide with phosphorothioate linkage
  modified_base 122: mod_base = OTHER; note = 2'-O-methyl modified nucleotide with phosphorothioate linkage
  modified_base 123: mod_base = OTHER; note = 2'-O-methyl modified nucleotide with phosphorothioate linkage
  modified_base 124: mod_base = OTHER; note = 2'-O-methyl modified nucleotide
gctggtacacggcagggtcagttttagagctagaaatagcaagttaaaataaggctagtccgttatcaacttgaaaaagtggcaccgagtcggtgccccacagatatcctgaccctgccgtgta

SEQ ID NO: 16741 - RNA, 123 nt, synthetic construct
  source 1..123: mol_type = other RNA
  modified_base 1: mod_base = OTHER; note = 2'-O-methyl modified nucleotide with phosphorothioate linkage
  modified_base 2: mod_base = OTHER; note = 2'-O-methyl modified nucleotide with phosphorothioate linkage
  modified_base 3: mod_base = OTHER; note = 2'-O-methyl modified nucleotide with phosphorothioate linkage
  modified_base 29: mod_base = OTHER; note = 2'-O-methyl modified nucleotide
  modified_base 30: mod_base = OTHER; note = 2'-O-methyl modified nucleotide
  modified_base 31: mod_base = OTHER; note = 2'-O-methyl modified nucleotide
  modified_base 32: mod_base = OTHER; note = 2'-O-methyl modified nucleotide
  modified_base 33: mod_base = OTHER; note = 2'-O-methyl modified nucleotide
  modified_base 34: mod_base = OTHER; note = 2'-O-methyl modified nucleotide
  modified_base 35: mod_base = OTHER; note = 2'-O-methyl modified nucleotide
  modified_base 36: mod_base = OTHER; note = 2'-O-methyl modified nucleotide
  modified_base 37: mod_base = OTHER; note = 2'-O-methyl modified nucleotide
  modified_base 38: mod_base = OTHER; note = 2'-O-methyl modified nucleotide
  modified_base 39: mod_base = OTHER; note = 2'-O-methyl modified nucleotide
  modified_base 40: mod_base = OTHER; note = 2'-O-methyl modified nucleotide
  modified_base 69: mod_base = OTHER; note = 2'-O-methyl modified nucleotide
  modified_base 70: mod_base = OTHER; note = 2'-O-methyl modified nucleotide
  modified_base 71: mod_base = OTHER; note = 2'-O-methyl modified nucleotide
  modified_base 72: mod_base = OTHER; note = 2'-O-methyl modified nucleotide
  modified_base 73: mod_base = OTHER; note = 2'-O-methyl modified nucleotide
  modified_base 74: mod_base = OTHER; note = 2'-O-methyl modified nucleotide
  modified_base 75: mod_base = OTHER; note = 2'-O-methyl modified nucleotide
  modified_base 76: mod_base = OTHER; note = 2'-O-methyl modified nucleotide
  modified_base 77: mod_base = OTHER; note = 2'-O-methyl modified nucleotide
  modified_base 78: mod_base = OTHER; note = 2'-O-methyl modified nucleotide
  modified_base 79: mod_base = OTHER; note = 2'-O-methyl modified nucleotide
  modified_base 80: mod_base = OTHER; note = 2'-O-methyl modified nucleotide
  modified_base 81: mod_base = OTHER; note = 2'-O-methyl modified nucleotide
  modified_base 82: mod_base = OTHER; note = 2'-O-methyl modified nucleotide
  modified_base 83: mod_base = OTHER; note = 2'-O-methyl modified nucleotide
  modified_base 84: mod_base = OTHER; note = 2'-O-methyl modified nucleotide
  modified_base 85: mod_base = OTHER; note = 2'-O-methyl modified nucleotide
  modified_base 86: mod_base = OTHER; note = 2'-O-methyl modified nucleotide
  modified_base 87: mod_base = OTHER; note = 2'-O-methyl modified nucleotide
  modified_base 88: mod_base = OTHER; note = 2'-O-methyl modified nucleotide
  modified_base 89: mod_base = OTHER; note = 2'-O-methyl modified nucleotide
  modified_base 90: mod_base = OTHER; note = 2'-O-methyl modified nucleotide
  modified_base 91: mod_base = OTHER; note = 2'-O-methyl modified nucleotide
  modified_base 92: mod_base = OTHER; note = 2'-O-methyl modified nucleotide
  modified_base 93: mod_base = OTHER; note = 2'-O-methyl modified nucleotide
  modified_base 94: mod_base = OTHER; note = 2'-O-methyl modified nucleotide
  modified_base 95: mod_base = OTHER; note = 2'-O-methyl modified nucleotide
  modified_base 96: mod_base = OTHER; note = 2'-O-methyl modified nucleotide
  modified_base 120: mod_base = OTHER; note = Nucleotide with phosphorothioate linkage
  modified_base 121: mod_base = OTHER; note = 2'-O-methyl modified nucleotide with phosphorothioate linkage
  modified_base 122: mod_base = OTHER; note = 2'-O-methyl modified nucleotide with phosphorothioate linkage
  modified_base 123: mod_base = OTHER; note = 2'-O-methyl modified nucleotide
gctggtacacggcagggtcagttttagagctagaaatagcaagttaaaataaggctagtccgttatcaacttgaaaaagtggcaccgagtcggtgccccacagatatcctgaccctgccgtgt

SEQ ID NO: 16742 - RNA, 122 nt, synthetic construct
  source 1..122: mol_type = other RNA
  modified_base 1: mod_base = OTHER; note = 2'-O-methyl modified nucleotide with phosphorothioate linkage
  modified_base 2: mod_base = OTHER; note = 2'-O-methyl modified nucleotide with phosphorothioate linkage
  modified_base 3: mod_base = OTHER; note = 2'-O-methyl modified nucleotide with phosphorothioate linkage
  modified_base 29: mod_base = OTHER; note = 2'-O-methyl modified nucleotide
  modified_base 30: mod_base = OTHER; note = 2'-O-methyl modified nucleotide
  modified_base 31: mod_base = OTHER; note = 2'-O-methyl modified nucleotide
  modified_base 32: mod_base = OTHER; note = 2'-O-methyl modified nucleotide
  modified_base 33: mod_base = OTHER; note = 2'-O-methyl modified nucleotide
  modified_base 34: mod_base = OTHER; note = 2'-O-methyl modified nucleotide
  modified_base 35: mod_base = OTHER; note = 2'-O-methyl modified nucleotide
  modified_base 36: mod_base = OTHER; note = 2'-O-methyl modified nucleotide
  modified_base 37: mod_base = OTHER; note = 2'-O-methyl modified nucleotide
  modified_base 38: mod_base = OTHER; note = 2'-O-methyl modified nucleotide
  modified_base 39: mod_base = OTHER; note = 2'-O-methyl modified nucleotide
  modified_base 40: mod_base = OTHER; note = 2'-O-methyl modified nucleotide
  modified_base 69: mod_base = OTHER; note = 2'-O-methyl modified nucleotide
  modified_base 70: mod_base = OTHER; note = 2'-O-methyl modified nucleotide
  modified_base 71: mod_base = OTHER; note = 2'-O-methyl modified nucleotide
  modified_base 72: mod_base = OTHER; note = 2'-O-methyl modified nucleotide
  modified_base 73: mod_base = OTHER; note = 2'-O-methyl modified nucleotide
  modified_base 74: mod_base = OTHER; note = 2'-O-methyl modified nucleotide
  modified_base 75: mod_base = OTHER; note = 2'-O-methyl modified nucleotide
  modified_base 76: mod_base = OTHER; note = 2'-O-methyl modified nucleotide
  modified_base 77: mod_base = OTHER; note = 2'-O-methyl modified nucleotide
  modified_base 78: mod_base = OTHER; note = 2'-O-methyl modified nucleotide
  modified_base 79: mod_base = OTHER; note = 2'-O-methyl modified nucleotide
  modified_base 80: mod_base = OTHER; note = 2'-O-methyl modified nucleotide
  modified_base 81: mod_base = OTHER; note = 2'-O-methyl modified nucleotide
  modified_base 82: mod_base = OTHER; note = 2'-O-methyl modified nucleotide
  modified_base 83: mod_base = OTHER; note = 2'-O-methyl modified nucleotide
  modified_base 84: mod_base = OTHER; note = 2'-O-methyl modified nucleotide
  modified_base 85: mod_base = OTHER; note = 2'-O-methyl modified nucleotide
  modified_base 86: mod_base = OTHER; note = 2'-O-methyl modified nucleotide
  modified_base 87: mod_base = OTHER; note = 2'-O-methyl modified nucleotide
  modified_base 88: mod_base = OTHER; note = 2'-O-methyl modified nucleotide
  modified_base 89: mod_base = OTHER; note = 2'-O-methyl modified nucleotide
  modified_base 90: mod_base = OTHER; note = 2'-O-methyl modified nucleotide
  modified_base 91: mod_base = OTHER; note = 2'-O-methyl modified nucleotide
  modified_base 92: mod_base = OTHER; note = 2'-O-methyl modified nucleotide
  modified_base 93: mod_base = OTHER; note = 2'-O-methyl modified nucleotide
  modified_base 94: mod_base = OTHER; note = 2'-O-methyl modified nucleotide
  modified_base 95: mod_base = OTHER; note = 2'-O-methyl modified nucleotide
  modified_base 96: mod_base = OTHER; note = 2'-O-methyl modified nucleotide
  modified_base 119: mod_base = OTHER; note = Nucleotide with phosphorothioate linkage
  modified_base 120: mod_base = OTHER; note = 2'-O-methyl modified nucleotide with phosphorothioate linkage
  modified_base 121: mod_base = OTHER; note = 2'-O-methyl modified nucleotide with phosphorothioate linkage
  modified_base 122: mod_base = OTHER; note = 2'-O-methyl modified nucleotide
gctggtacacggcagggtcagttttagagctagaaatagcaagttaaaataaggctagtccgttatcaacttgaaaaagtggcaccgagtcggtgccccacagatatcctgaccctgccgtg

SEQ ID NO: 16743 - RNA, 121 nt, synthetic construct
  source 1..121: mol_type = other RNA
  modified_base 1: mod_base = OTHER; note = 2'-O-methyl modified nucleotide with phosphorothioate linkage
  modified_base 2: mod_base = OTHER; note = 2'-O-methyl modified nucleotide with phosphorothioate linkage
  modified_base 3: mod_base = OTHER; note = 2'-O-methyl modified nucleotide with phosphorothioate linkage
  modified_base 29: mod_base = OTHER; note = 2'-O-methyl modified nucleotide
  modified_base 30: mod_base = OTHER; note = 2'-O-methyl modified nucleotide
  modified_base 31: mod_base = OTHER; note = 2'-O-methyl modified nucleotide
  modified_base 32: mod_base = OTHER; note = 2'-O-methyl modified nucleotide
  modified_base 33: mod_base = OTHER; note = 2'-O-methyl modified nucleotide
  modified_base 34: mod_base = OTHER; note = 2'-O-methyl modified nucleotide
  modified_base 35: mod_base = OTHER; note = 2'-O-methyl modified nucleotide
  modified_base 36: mod_base = OTHER; note = 2'-O-methyl modified nucleotide
  modified_base 37: mod_base = OTHER; note = 2'-O-methyl modified nucleotide
  modified_base 38: mod_base = OTHER; note = 2'-O-methyl modified nucleotide
  modified_base 39: mod_base = OTHER; note = 2'-O-methyl modified nucleotide
  modified_base 40: mod_base = OTHER; note = 2'-O-methyl modified nucleotide
  modified_base 69: mod_base = OTHER; note = 2'-O-methyl modified nucleotide
  modified_base 70: mod_base = OTHER; note = 2'-O-methyl modified nucleotide
  modified_base 71: mod_base = OTHER; note = 2'-O-methyl modified nucleotide
  modified_base 72: mod_base = OTHER; note = 2'-O-methyl modified nucleotide
  modified_base 73: mod_base = OTHER; note = 2'-O-methyl modified nucleotide
  modified_base 74: mod_base = OTHER; note = 2'-O-methyl modified nucleotide
  modified_base 75: mod_base = OTHER; note = 2'-O-methyl modified nucleotide
  modified_base 76: mod_base = OTHER; note = 2'-O-methyl modified nucleotide
  modified_base 77: mod_base = OTHER; note = 2'-O-methyl modified nucleotide
  modified_base 78: mod_base = OTHER; note = 2'-O-methyl modified nucleotide
  modified_base 79: mod_base = OTHER; note = 2'-O-methyl modified nucleotide
  modified_base 80: mod_base = OTHER; note = 2'-O-methyl modified nucleotide
  modified_base 81: mod_base = OTHER; note = 2'-O-methyl modified nucleotide
  modified_base 82: mod_base = OTHER; note = 2'-O-methyl modified nucleotide
  modified_base 83: mod_base = OTHER; note = 2'-O-methyl modified nucleotide
  modified_base 84: mod_base = OTHER; note = 2'-O-methyl modified nucleotide
  modified_base 85: mod_base = OTHER; note = 2'-O-methyl modified nucleotide
  modified_base 86: mod_base = OTHER; note = 2'-O-methyl modified nucleotide
  modified_base 87: mod_base = OTHER; note = 2'-O-methyl modified nucleotide
  modified_base 88: mod_base = OTHER; note = 2'-O-methyl modified nucleotide
  modified_base 89: mod_base = OTHER; note = 2'-O-methyl modified nucleotide
  modified_base 90: mod_base = OTHER; note = 2'-O-methyl modified nucleotide
  modified_base 91: mod_base = OTHER; note = 2'-O-methyl modified nucleotide
  modified_base 92: mod_base = OTHER; note = 2'-O-methyl modified nucleotide
  modified_base 93: mod_base = OTHER; note = 2'-O-methyl modified nucleotide
  modified_base 94: mod_base = OTHER; note = 2'-O-methyl modified nucleotide
  modified_base 95: mod_base = OTHER; note = 2'-O-methyl modified nucleotide
  modified_base 96: mod_base = OTHER; note = 2'-O-methyl modified nucleotide
  modified_base 118: mod_base = OTHER; note = Nucleotide with phosphorothioate linkage
  modified_base 119: mod_base = OTHER; note = 2'-O-methyl modified nucleotide with phosphorothioate linkage
  modified_base 120: mod_base = OTHER; note = 2'-O-methyl modified nucleotide with phosphorothioate linkage
  modified_base 121: mod_base = OTHER; note = 2'-O-methyl modified nucleotide
gctggtacacggcagggtcagttttagagctagaaatagcaagttaaaataaggctagtccgttatcaacttgaaaaagtggcaccgagtcggtgccccacagatatcctgaccctgccgt

SEQ ID NO: 16744 - RNA, 120 nt, synthetic construct
  source 1..120: mol_type = other RNA
  modified_base 1: mod_base = OTHER; note = 2'-O-methyl modified nucleotide with phosphorothioate linkage
  modified_base 2: mod_base = OTHER; note = 2'-O-methyl modified nucleotide with phosphorothioate linkage
  modified_base 3: mod_base = OTHER; note = 2'-O-methyl modified nucleotide with phosphorothioate linkage
  modified_base 29: mod_base = OTHER; note = 2'-O-methyl modified nucleotide
  modified_base 30: mod_base = OTHER; note = 2'-O-methyl modified nucleotide
  modified_base 31: mod_base = OTHER; note = 2'-O-methyl modified nucleotide
  modified_base 32: mod_base = OTHER; note = 2'-O-methyl modified nucleotide
  modified_base 33: mod_base = OTHER; note = 2'-O-methyl modified nucleotide
  modified_base 34: mod_base = OTHER; note = 2'-O-methyl modified nucleotide
  modified_base 35: mod_base = OTHER; note = 2'-O-methyl modified nucleotide
  modified_base 36: mod_base = OTHER; note = 2'-O-methyl modified nucleotide
  modified_base 37: mod_base = OTHER; note = 2'-O-methyl modified nucleotide
  modified_base 38: mod_base = OTHER; note = 2'-O-methyl modified nucleotide
  modified_base 39: mod_base = OTHER; note = 2'-O-methyl modified nucleotide
  modified_base 40: mod_base = OTHER; note = 2'-O-methyl modified nucleotide
  modified_base 69: mod_base = OTHER; note = 2'-O-methyl modified nucleotide
  modified_base 70: mod_base = OTHER; note = 2'-O-methyl modified nucleotide
  modified_base 71: mod_base = OTHER; note = 2'-O-methyl modified nucleotide
  modified_base 72: mod_base = OTHER; note = 2'-O-methyl modified nucleotide
  modified_base 73: mod_base = OTHER; note = 2'-O-methyl modified nucleotide
  modified_base 74: mod_base = OTHER; note = 2'-O-methyl modified nucleotide
  modified_base 75: mod_base = OTHER; note = 2'-O-methyl modified nucleotide
  modified_base 76: mod_base = OTHER; note = 2'-O-methyl modified nucleotide
  modified_base 77: mod_base = OTHER; note = 2'-O-methyl modified nucleotide
  modified_base 78: mod_base = OTHER; note = 2'-O-methyl modified nucleotide
  modified_base 79: mod_base = OTHER; note = 2'-O-methyl modified nucleotide
  modified_base 80: mod_base = OTHER; note = 2'-O-methyl modified nucleotide
  modified_base 81: mod_base = OTHER; note = 2'-O-methyl modified nucleotide
  modified_base 82: mod_base = OTHER; note = 2'-O-methyl modified nucleotide
  modified_base 83: mod_base = OTHER; note = 2'-O-methyl modified nucleotide
  modified_base 84: mod_base = OTHER; note = 2'-O-methyl modified nucleotide
  modified_base 85: mod_base = OTHER; note = 2'-O-methyl modified nucleotide
  modified_base 86: mod_base = OTHER; note = 2'-O-methyl modified nucleotide
  modified_base 87: mod_base = OTHER; note = 2'-O-methyl modified nucleotide
  modified_base 88: mod_base = OTHER; note = 2'-O-methyl modified nucleotide
  modified_base 89: mod_base = OTHER; note = 2'-O-methyl modified nucleotide
  modified_base 90: mod_base = OTHER; note = 2'-O-methyl modified nucleotide
  modified_base 91: mod_base = OTHER; note = 2'-O-methyl modified nucleotide
  modified_base 92: mod_base = OTHER; note = 2'-O-methyl modified nucleotide
  modified_base 93: mod_base = OTHER; note = 2'-O-methyl modified nucleotide
  modified_base 94: mod_base = OTHER; note = 2'-O-methyl modified nucleotide
  modified_base 95: mod_base = OTHER; note = 2'-O-methyl modified nucleotide
  modified_base 96: mod_base = OTHER; note = 2'-O-methyl modified nucleotide
  modified_base 117: mod_base = OTHER; note = Nucleotide with phosphorothioate linkage
  modified_base 118: mod_base = OTHER; note = 2'-O-methyl modified nucleotide with phosphorothioate linkage
  modified_base 119: mod_base = OTHER; note = 2'-O-methyl modified nucleotide with phosphorothioate linkage
  modified_base 120: mod_base = OTHER; note = 2'-O-methyl modified nucleotide
gctggtacacggcagggtcagttttagagctagaaatagcaagttaaaataaggctagtccgttatcaacttgaaaaagtggcaccgagtcggtgccccacagatatcctgaccctgccg

SEQ ID NO: 16745 - RNA, 127 nt, synthetic construct
  source 1..127: mol_type = other RNA
  modified_base 1: mod_base = OTHER; note = 2'-O-methyl modified nucleotide with phosphorothioate linkage
  modified_base 2: mod_base = OTHER; note = 2'-O-methyl modified nucleotide with phosphorothioate linkage
  modified_base 3: mod_base = OTHER; note = 2'-O-methyl modified nucleotide with phosphorothioate linkage
  modified_base 29: mod_base = OTHER; note = 2'-O-methyl modified nucleotide
  modified_base 30: mod_base = OTHER; note = 2'-O-methyl modified nucleotide
  modified_base 31: mod_base = OTHER; note = 2'-O-methyl modified nucleotide
  modified_base 32: mod_base = OTHER; note = 2'-O-methyl modified nucleotide
  modified_base 33: mod_base = OTHER; note = 2'-O-methyl modified nucleotide
  modified_base 34: mod_base = OTHER; note = 2'-O-methyl modified nucleotide
  modified_base 35: mod_base = OTHER; note = 2'-O-methyl modified nucleotide
  modified_base 36: mod_base = OTHER; note = 2'-O-methyl modified nucleotide
  modified_base 37: mod_base = OTHER; note = 2'-O-methyl modified nucleotide
  modified_base 38: mod_base = OTHER; note = 2'-O-methyl modified nucleotide
  modified_base 39: mod_base = OTHER; note = 2'-O-methyl modified nucleotide
  modified_base 40: mod_base = OTHER; note = 2'-O-methyl modified nucleotide
  modified_base 69: mod_base = OTHER; note = 2'-O-methyl modified nucleotide
  modified_base 70: mod_base = OTHER; note = 2'-O-methyl modified nucleotide
  modified_base 71: mod_base = OTHER; note = 2'-O-methyl modified nucleotide
  modified_base 72: mod_base = OTHER; note = 2'-O-methyl modified nucleotide
  modified_base 73: mod_base = OTHER; note = 2'-O-methyl modified nucleotide
  modified_base 74: mod_base = OTHER; note = 2'-O-methyl modified nucleotide
  modified_base 75: mod_base = OTHER; note = 2'-O-methyl modified nucleotide
  modified_base 76: mod_base = OTHER; note = 2'-O-methyl modified nucleotide
  modified_base 77: mod_base = OTHER; note = 2'-O-methyl modified nucleotide
  modified_base 78: mod_base = OTHER; note = 2'-O-methyl modified nucleotide
  modified_base 79: mod_base = OTHER; note = 2'-O-methyl modified nucleotide
  modified_base 80: mod_base = OTHER; note = 2'-O-methyl modified nucleotide
  modified_base 81: mod_base = OTHER; note = 2'-O-methyl modified nucleotide
  modified_base 82: mod_base = OTHER; note = 2'-O-methyl modified nucleotide
  modified_base 83: mod_base = OTHER; note = 2'-O-methyl modified nucleotide
  modified_base 84: mod_base = OTHER; note = 2'-O-methyl modified nucleotide
  modified_base 85: mod_base = OTHER; note = 2'-O-methyl modified nucleotide
  modified_base 86: mod_base = OTHER; note = 2'-O-methyl modified nucleotide
  modified_base 87: mod_base = OTHER; note = 2'-O-methyl modified nucleotide
  modified_base 88: mod_base = OTHER; note = 2'-O-methyl modified nucleotide
  modified_base 89: mod_base = OTHER; note = 2'-O-methyl modified nucleotide
  modified_base 90: mod_base = OTHER; note = 2'-O-methyl modified nucleotide
  modified_base 91: mod_base = OTHER; note = 2'-O-methyl modified nucleotide
  modified_base 92: mod_base = OTHER; note = 2'-O-methyl modified nucleotide
  modified_base 93: mod_base = OTHER; note = 2'-O-methyl modified nucleotide
  modified_base 94: mod_base = OTHER; note = 2'-O-methyl modified nucleotide
  modified_base 95: mod_base = OTHER; note = 2'-O-methyl modified nucleotide
  modified_base 96: mod_base = OTHER; note = 2'-O-methyl modified nucleotide
  modified_base 124: mod_base = OTHER; note = Nucleotide with phosphorothioate linkage
  modified_base 125: mod_base = OTHER; note = 2'-O-methyl modified nucleotide with phosphorothioate linkage
  modified_base 126: mod_base = OTHER; note = 2'-O-methyl modified nucleotide with phosphorothioate linkage
  modified_base 127: mod_base = OTHER; note = 2'-O-methyl modified nucleotide
gctggtacacggcagggtcagttttagagctagaaatagcaagttaaaataaggctagtccgttatcaacttgaaaaagtggcaccgagtcggtgcgtcccacagatatcctgaccctgccgtgtac

SEQ ID NO: 16746 - RNA, 126 nt, synthetic construct
  source 1..126: mol_type = other RNA
  modified_base 1: mod_base = OTHER; note = 2'-O-methyl modified nucleotide with phosphorothioate linkage
  modified_base 2: mod_base = OTHER; note = 2'-O-methyl modified nucleotide with phosphorothioate linkage
  modified_base 3: mod_base = OTHER; note = 2'-O-methyl modified nucleotide with phosphorothioate linkage
  modified_base 29: mod_base = OTHER; note = 2'-O-methyl modified nucleotide
  modified_base 30: mod_base = OTHER; note = 2'-O-methyl modified nucleotide
  modified_base 31: mod_base = OTHER; note = 2'-O-methyl modified nucleotide
  modified_base 32: mod_base = OTHER; note = 2'-O-methyl modified nucleotide
  modified_base 33: mod_base = OTHER; note = 2'-O-methyl modified nucleotide
  modified_base 34: mod_base = OTHER; note = 2'-O-methyl modified nucleotide
  modified_base 35: mod_base = OTHER; note = 2'-O-methyl modified nucleotide
  modified_base 36: mod_base = OTHER; note = 2'-O-methyl modified nucleotide
  modified_base 37: mod_base = OTHER; note = 2'-O-methyl modified nucleotide
  modified_base 38: mod_base = OTHER; note = 2'-O-methyl modified nucleotide
  modified_base 39: mod_base = OTHER; note = 2'-O-methyl modified nucleotide
  modified_base 40: mod_base = OTHER; note = 2'-O-methyl modified nucleotide
  modified_base 69: mod_base = OTHER; note = 2'-O-methyl modified nucleotide
  modified_base 70: mod_base = OTHER; note = 2'-O-methyl modified nucleotide
  modified_base 71: mod_base = OTHER; note = 2'-O-methyl modified nucleotide
  modified_base 72: mod_base = OTHER; note = 2'-O-methyl modified nucleotide
  modified_base 73: mod_base = OTHER; note = 2'-O-methyl modified nucleotide
  modified_base 74: mod_base = OTHER; note = 2'-O-methyl modified nucleotide
  modified_base 75: mod_base = OTHER; note = 2'-O-methyl modified nucleotide
  modified_base 76: mod_base = OTHER; note = 2'-O-methyl modified nucleotide
  modified_base 77: mod_base = OTHER; note = 2'-O-methyl modified nucleotide
  modified_base 78: mod_base = OTHER; note = 2'-O-methyl modified nucleotide
  modified_base 79: mod_base = OTHER; note = 2'-O-methyl modified nucleotide
  modified_base 80: mod_base = OTHER; note = 2'-O-methyl modified nucleotide
  modified_base 81: mod_base = OTHER; note = 2'-O-methyl modified nucleotide
  modified_base 82: mod_base = OTHER; note = 2'-O-methyl modified nucleotide
  modified_base 83: mod_base = OTHER; note = 2'-O-methyl modified nucleotide
  modified_base 84: mod_base = OTHER; note = 2'-O-methyl modified nucleotide
  modified_base 85: mod_base = OTHER; note = 2'-O-methyl modified nucleotide
  modified_base 86: mod_base = OTHER; note = 2'-O-methyl modified nucleotide
  modified_base 87: mod_base = OTHER; note = 2'-O-methyl modified nucleotide
  modified_base 88: mod_base = OTHER; note = 2'-O-methyl modified nucleotide
  modified_base 89: mod_base = OTHER; note = 2'-O-methyl modified nucleotide
  modified_base 90: mod_base = OTHER; note = 2'-O-methyl modified nucleotide
  modified_base 91: mod_base = OTHER; note = 2'-O-methyl modified nucleotide
  modified_base 92: mod_base = OTHER; note = 2'-O-methyl modified nucleotide
  modified_base 93: mod_base = OTHER; note = 2'-O-methyl modified nucleotide
  modified_base 94: mod_base = OTHER; note = 2'-O-methyl modified nucleotide
  modified_base 95: mod_base = OTHER; note = 2'-O-methyl modified nucleotide
  modified_base 96: mod_base = OTHER; note = 2'-O-methyl modified nucleotide
  modified_base 123: mod_base = OTHER; note = Nucleotide with phosphorothioate linkage
  modified_base 124: mod_base = OTHER; note = 2'-O-methyl modified nucleotide with phosphorothioate linkage
  modified_base 125: mod_base = OTHER; note = 2'-O-methyl modified nucleotide with phosphorothioate linkage
  modified_base 126: mod_base = OTHER; note = 2'-O-methyl modified nucleotide
gctggtacacggcagggtcagttttagagctagaaatagcaagttaaaataaggctagtccgttatcaacttgaaaaagtggcaccgagtcggtgcgtcccacagatatcctgaccctgccgtgta

SEQ ID NO: 16747 - RNA, 125 nt, synthetic construct
  source 1..125: mol_type = other RNA
  modified_base 1: mod_base = OTHER; note = 2'-O-methyl modified nucleotide with phosphorothioate linkage
  modified_base 2: mod_base = OTHER; note = 2'-O-methyl modified nucleotide with phosphorothioate linkage
  modified_base 3: mod_base = OTHER; note = 2'-O-methyl modified nucleotide with phosphorothioate linkage
  modified_base 29: mod_base = OTHER; note = 2'-O-methyl modified nucleotide
  modified_base 30: mod_base = OTHER; note = 2'-O-methyl modified nucleotide
  modified_base 31: mod_base = OTHER; note = 2'-O-methyl modified nucleotide
  modified_base 32: mod_base = OTHER; note = 2'-O-methyl modified nucleotide
  modified_base 33: mod_base = OTHER; note = 2'-O-methyl modified nucleotide
  modified_base 34: mod_base = OTHER; note = 2'-O-methyl modified nucleotide
  modified_base 35: mod_base = OTHER; note = 2'-O-methyl modified nucleotide
  modified_base 36: mod_base = OTHER; note = 2'-O-methyl modified nucleotide
  modified_base 37: mod_base = OTHER; note = 2'-O-methyl modified nucleotide
  modified_base 38: mod_base = OTHER; note = 2'-O-methyl modified nucleotide
  modified_base 39: mod_base = OTHER; note = 2'-O-methyl modified nucleotide
  modified_base 40: mod_base = OTHER; note = 2'-O-methyl modified nucleotide
  modified_base 69: mod_base = OTHER; note = 2'-O-methyl modified nucleotide
  modified_base 70: mod_base = OTHER; note = 2'-O-methyl modified nucleotide
  modified_base 71: mod_base = OTHER; note = 2'-O-methyl modified nucleotide
  modified_base 72: mod_base = OTHER; note = 2'-O-methyl modified nucleotide
  modified_base 73: mod_base = OTHER; note = 2'-O-methyl modified nucleotide
  modified_base 74: mod_base = OTHER; note = 2'-O-methyl modified nucleotide
  modified_base 75: mod_base = OTHER; note = 2'-O-methyl modified nucleotide
  modified_base 76: mod_base = OTHER; note = 2'-O-methyl modified nucleotide
  modified_base 77: mod_base = OTHER; note = 2'-O-methyl modified nucleotide
  modified_base 78: mod_base = OTHER; note = 2'-O-methyl modified nucleotide
  modified_base 79: mod_base = OTHER; note = 2'-O-methyl modified nucleotide
  modified_base 80: mod_base = OTHER; note = 2'-O-methyl modified nucleotide
  modified_base 81: mod_base = OTHER; note = 2'-O-methyl modified nucleotide
  modified_base 82: mod_base = OTHER; note = 2'-O-methyl modified nucleotide
  modified_base 83: mod_base = OTHER; note = 2'-O-methyl modified nucleotide
  modified_base 84: mod_base = OTHER; note = 2'-O-methyl modified nucleotide
  modified_base 85: mod_base = OTHER; note = 2'-O-methyl modified nucleotide
  modified_base 86: mod_base = OTHER; note = 2'-O-methyl modified nucleotide
  modified_base 87: mod_base = OTHER; note = 2'-O-methyl modified nucleotide
  modified_base 88: mod_base = OTHER; note = 2'-O-methyl modified nucleotide
  modified_base 89: mod_base = OTHER; note = 2'-O-methyl modified nucleotide
  modified_base 90: mod_base = OTHER; note = 2'-O-methyl modified nucleotide
  modified_base 91: mod_base = OTHER; note = 2'-O-methyl modified nucleotide
  modified_base 92: mod_base = OTHER; note = 2'-O-methyl modified nucleotide
  modified_base 93: mod_base = OTHER; note = 2'-O-methyl modified nucleotide
  modified_base 94: mod_base = OTHER; note = 2'-O-methyl modified nucleotide
  modified_base 95: mod_base = OTHER; note = 2'-O-methyl modified nucleotide
  modified_base 96: mod_base = OTHER; note = 2'-O-methyl modified nucleotide
  modified_base 122: mod_base = OTHER; note = Nucleotide with phosphorothioate linkage
  modified_base 123: mod_base = OTHER; note = 2'-O-methyl modified nucleotide with phosphorothioate linkage
  modified_base 124: mod_base = OTHER; note = 2'-O-methyl modified nucleotide with phosphorothioate linkage
  modified_base 125: mod_base = OTHER; note = 2'-O-methyl modified nucleotide
gctggtacacggcagggtcagttttagagctagaaatagcaagttaaaataaggctagtccgttatcaacttgaaaaagtggcaccgagtcggtgcgtcccacagatatcctgaccctgccgtgt

SEQ ID NO: 16748 - RNA, 124 nt, synthetic construct
  source 1..124: mol_type = other RNA
  modified_base 1: mod_base = OTHER; note = 2'-O-methyl modified nucleotide with phosphorothioate linkage
  modified_base 2: mod_base = OTHER; note = 2'-O-methyl modified nucleotide with phosphorothioate linkage
  modified_base 3: mod_base = OTHER; note = 2'-O-methyl modified nucleotide with phosphorothioate linkage
  modified_base 29: mod_base = OTHER; note = 2'-O-methyl modified nucleotide
  modified_base 30: mod_base = OTHER; note = 2'-O-methyl modified nucleotide
  modified_base 31: mod_base = OTHER; note = 2'-O-methyl modified nucleotide
  modified_base 32: mod_base = OTHER; note = 2'-O-methyl modified nucleotide
  modified_base 33: mod_base = OTHER; note = 2'-O-methyl modified nucleotide
  modified_base 34: mod_base = OTHER; note = 2'-O-methyl modified nucleotide
  modified_base 35: mod_base = OTHER; note = 2'-O-methyl modified nucleotide
  modified_base 36: mod_base = OTHER; note = 2'-O-methyl modified nucleotide
  modified_base 37: mod_base = OTHER; note = 2'-O-methyl modified nucleotide
  modified_base 38: mod_base = OTHER; note = 2'-O-methyl modified nucleotide
  modified_base 39: mod_base = OTHER; note = 2'-O-methyl modified nucleotide
  modified_base 40: mod_base = OTHER; note = 2'-O-methyl modified nucleotide
  modified_base 69: mod_base = OTHER; note = 2'-O-methyl modified nucleotide
  modified_base 70: mod_base = OTHER; note = 2'-O-methyl modified nucleotide
  modified_base 71: mod_base = OTHER; note = 2'-O-methyl modified nucleotide
  modified_base 72: mod_base = OTHER; note = 2'-O-methyl modified nucleotide
  modified_base 73: mod_base = OTHER; note = 2'-O-methyl modified nucleotide
  modified_base 74: mod_base = OTHER; note = 2'-O-methyl modified nucleotide
  modified_base 75: mod_base = OTHER; note = 2'-O-methyl modified nucleotide
  modified_base 76: mod_base = OTHER; note = 2'-O-methyl modified nucleotide
  modified_base 77: mod_base = OTHER; note = 2'-O-methyl modified nucleotide
  modified_base 78: mod_base = OTHER; note = 2'-O-methyl modified nucleotide
  modified_base 79: mod_base = OTHER; note = 2'-O-methyl modified nucleotide
  modified_base 80: mod_base = OTHER; note = 2'-O-methyl modified nucleotide
  modified_base 81: mod_base = OTHER; note = 2'-O-methyl modified nucleotide
  modified_base 82: mod_base = OTHER; note = 2'-O-methyl modified nucleotide
  modified_base 83: mod_base = OTHER; note = 2'-O-methyl modified nucleotide
  modified_base 84: mod_base = OTHER; note = 2'-O-methyl modified nucleotide
  modified_base 85: mod_base = OTHER; note = 2'-O-methyl modified nucleotide
  modified_base 86: mod_base = OTHER; note = 2'-O-methyl modified nucleotide
  modified_base 87: mod_base = OTHER; note = 2'-O-methyl modified nucleotide
  modified_base 88: mod_base = OTHER; note = 2'-O-methyl modified nucleotide
  modified_base 89: mod_base = OTHER; note = 2'-O-methyl modified nucleotide
  modified_base 90: mod_base = OTHER; note = 2'-O-methyl modified nucleotide
  modified_base 91: mod_base = OTHER; note = 2'-O-methyl modified nucleotide
  modified_base 92: mod_base = OTHER; note = 2'-O-methyl modified nucleotide
  modified_base 93: mod_base = OTHER; note = 2'-O-methyl modified nucleotide
  modified_base 94: mod_base = OTHER; note = 2'-O-methyl modified nucleotide
  modified_base 95: mod_base = OTHER; note = 2'-O-methyl modified nucleotide
  modified_base 96: mod_base = OTHER; note = 2'-O-methyl modified nucleotide
  modified_base 121: mod_base = OTHER; note = Nucleotide with phosphorothioate linkage
  modified_base 122: mod_base = OTHER; note = 2'-O-methyl modified nucleotide with phosphorothioate linkage
  modified_base 123: mod_base = OTHER; note = 2'-O-methyl modified nucleotide with phosphorothioate linkage
  modified_base 124: mod_base = OTHER; note = 2'-O-methyl modified nucleotide
gctggtacacggcagggtcagttttagagctagaaatagcaagttaaaataaggctagtccgttatcaacttgaaaaagtggcaccgagtcggtgcgtcccacagatatcctgaccctgccgtg

SEQ ID NO: 16749 - RNA, 123 nt, synthetic construct
  source 1..123: mol_type = other RNA
  modified_base 1: mod_base = OTHER; note = 2'-O-methyl modified nucleotide with phosphorothioate linkage
  modified_base 2: mod_base = OTHER; note = 2'-O-methyl modified nucleotide with phosphorothioate linkage
  modified_base 3: mod_base = OTHER; note = 2'-O-methyl modified nucleotide with phosphorothioate linkage
  modified_base 29: mod_base = OTHER; note = 2'-O-methyl modified nucleotide
  modified_base 30: mod_base = OTHER; note = 2'-O-methyl modified nucleotide
  modified_base 31: mod_base = OTHER; note = 2'-O-methyl modified nucleotide
  modified_base 32: mod_base = OTHER; note = 2'-O-methyl modified nucleotide
  modified_base 33: mod_base = OTHER; note = 2'-O-methyl modified nucleotide
  modified_base 34: mod_base = OTHER; note = 2'-O-methyl modified nucleotide
  modified_base 35: mod_base = OTHER; note = 2'-O-methyl modified nucleotide
  modified_base 36: mod_base = OTHER; note = 2'-O-methyl modified nucleotide
  modified_base 37: mod_base = OTHER; note = 2'-O-methyl modified nucleotide
  modified_base 38: mod_base = OTHER; note = 2'-O-methyl modified nucleotide
  modified_base 39: mod_base = OTHER; note = 2'-O-methyl modified nucleotide
  modified_base 40: mod_base = OTHER; note = 2'-O-methyl modified nucleotide
  modified_base 69: mod_base = OTHER; note = 2'-O-methyl modified nucleotide
  modified_base 70: mod_base = OTHER; note = 2'-O-methyl modified nucleotide
  modified_base 71: mod_base = OTHER; note = 2'-O-methyl modified nucleotide
  modified_base 72: mod_base = OTHER; note = 2'-O-methyl modified nucleotide
  modified_base 73: mod_base = OTHER; note = 2'-O-methyl modified nucleotide
  modified_base 74: mod_base = OTHER; note = 2'-O-methyl modified nucleotide
  modified_base 75: mod_base = OTHER; note = 2'-O-methyl modified nucleotide
  modified_base 76: mod_base = OTHER; note = 2'-O-methyl modified nucleotide
  modified_base 77: mod_base = OTHER; note = 2'-O-methyl modified nucleotide
  modified_base 78: mod_base = OTHER; note = 2'-O-methyl modified nucleotide
  modified_base 79: mod_base = OTHER; note = 2'-O-methyl modified nucleotide
  modified_base 80: mod_base = OTHER; note = 2'-O-methyl modified nucleotide
  modified_base 81: mod_base = OTHER; note = 2'-O-methyl modified nucleotide
  modified_base 82: mod_base = OTHER; note = 2'-O-methyl modified nucleotide
  modified_base 83: mod_base = OTHER; note = 2'-O-methyl modified nucleotide
  modified_base 84: mod_base = OTHER; note = 2'-O-methyl modified nucleotide
  modified_base 85: mod_base = OTHER; note = 2'-O-methyl modified nucleotide
  modified_base 86: mod_base = OTHER; note = 2'-O-methyl modified nucleotide
  modified_base 87: mod_base = OTHER; note = 2'-O-methyl modified nucleotide
  modified_base 88: mod_base = OTHER; note = 2'-O-methyl modified nucleotide
  modified_base 89: mod_base = OTHER; note = 2'-O-methyl modified nucleotide
  modified_base 90: mod_base = OTHER; note = 2'-O-methyl modified nucleotide
  modified_base 91: mod_base = OTHER; note = 2'-O-methyl modified nucleotide
  modified_base 92: mod_base = OTHER; note = 2'-O-methyl modified nucleotide
  modified_base 93: mod_base = OTHER; note = 2'-O-methyl modified nucleotide
  modified_base 94: mod_base = OTHER; note = 2'-O-methyl modified nucleotide
  modified_base 95: mod_base = OTHER; note = 2'-O-methyl modified nucleotide
  modified_base 96: mod_base = OTHER; note = 2'-O-methyl modified nucleotide
  modified_base 120: mod_base = OTHER; note = Nucleotide with phosphorothioate linkage
  modified_base 121: mod_base = OTHER; note = 2'-O-methyl modified nucleotide with phosphorothioate linkage
  modified_base 122: mod_base = OTHER; note = 2'-O-methyl modified nucleotide with phosphorothioate linkage
  modified_base 123: mod_base = OTHER; note = 2'-O-methyl modified nucleotide
gctggtacacggcagggtcagttttagagctagaaatagcaagttaaaataaggctagtccgttatcaacttgaaaaagtggcaccgagtcggtgcgtcccacagatatcctgaccctgccgt

SEQ ID NO: 16750 - RNA, 122 nt, synthetic construct
  source 1..122: mol_type = other RNA
  modified_base 1: mod_base = OTHER; note = 2'-O-methyl modified nucleotide with phosphorothioate linkage
  modified_base 2: mod_base = OTHER; note = 2'-O-methyl modified nucleotide with phosphorothioate linkage
  modified_base 3: mod_base = OTHER; note = 2'-O-methyl modified nucleotide with phosphorothioate linkage
  modified_base 29: mod_base = OTHER; note = 2'-O-methyl modified nucleotide
  modified_base 30: mod_base = OTHER; note = 2'-O-methyl modified nucleotide
  modified_base 31: mod_base = OTHER; note = 2'-O-methyl modified nucleotide
  modified_base 32: mod_base = OTHER; note = 2'-O-methyl modified nucleotide
  modified_base 33: mod_base = OTHER; note = 2'-O-methyl modified nucleotide
  modified_base 34: mod_base = OTHER; note = 2'-O-methyl modified nucleotide
  modified_base 35: mod_base = OTHER; note = 2'-O-methyl modified nucleotide
  modified_base 36: mod_base = OTHER; note = 2'-O-methyl modified nucleotide
  modified_base 37: mod_base = OTHER; note = 2'-O-methyl modified nucleotide
  modified_base 38: mod_base = OTHER; note = 2'-O-methyl modified nucleotide
  modified_base 39: mod_base = OTHER; note = 2'-O-methyl modified nucleotide
  modified_base 40: mod_base = OTHER; note = 2'-O-methyl modified nucleotide
  modified_base 69: mod_base = OTHER; note = 2'-O-methyl modified nucleotide
  modified_base 70: mod_base = OTHER; note = 2'-O-methyl modified nucleotide
  modified_base 71: mod_base = OTHER; note = 2'-O-methyl modified nucleotide
  modified_base 72: mod_base = OTHER; note = 2'-O-methyl modified nucleotide
  modified_base 73: mod_base = OTHER; note = 2'-O-methyl modified nucleotide
  modified_base 74: mod_base = OTHER; note = 2'-O-methyl modified nucleotide
  modified_base 75: mod_base = OTHER; note = 2'-O-methyl modified nucleotide
  modified_base 76: mod_base = OTHER; note = 2'-O-methyl modified nucleotide
  modified_base 77: mod_base = OTHER; note = 2'-O-methyl modified nucleotide
  modified_base 78: mod_base = OTHER; note = 2'-O-methyl modified nucleotide
  modified_base 79: mod_base = OTHER; note = 2'-O-methyl modified nucleotide
  modified_base 80: mod_base = OTHER; note = 2'-O-methyl modified nucleotide
  modified_base 81: mod_base = OTHER; note = 2'-O-methyl modified nucleotide
  modified_base 82: mod_base = OTHER; note = 2'-O-methyl modified nucleotide
  modified_base 83: mod_base = OTHER; note = 2'-O-methyl modified nucleotide
  modified_base 84: mod_base = OTHER; note = 2'-O-methyl modified nucleotide
  modified_base 85: mod_base = OTHER; note = 2'-O-methyl modified nucleotide
  modified_base 86: mod_base = OTHER; note = 2'-O-methyl modified nucleotide
  modified_base 87: mod_base = OTHER; note = 2'-O-methyl modified nucleotide
  modified_base 88: mod_base = OTHER; note = 2'-O-methyl modified nucleotide
  modified_base 89: mod_base = OTHER; note = 2'-O-methyl modified nucleotide
  modified_base 90: mod_base = OTHER; note = 2'-O-methyl modified nucleotide
  modified_base 91: mod_base = OTHER; note = 2'-O-methyl modified nucleotide
  modified_base 92: mod_base = OTHER; note = 2'-O-methyl modified nucleotide
  modified_base 93: mod_base = OTHER; note = 2'-O-methyl modified nucleotide
  modified_base 94: mod_base = OTHER; note = 2'-O-methyl modified nucleotide
  modified_base 95: mod_base = OTHER; note = 2'-O-methyl modified nucleotide
  modified_base 96: mod_base = OTHER; note = 2'-O-methyl modified nucleotide
  modified_base 119: mod_base = OTHER; note = Nucleotide with phosphorothioate linkage
  modified_base 120: mod_base = OTHER; note = 2'-O-methyl modified nucleotide with phosphorothioate linkage
  modified_base 121: mod_base = OTHER; note = 2'-O-methyl modified nucleotide with phosphorothioate linkage
  modified_base 122: mod_base = OTHER; note = 2'-O-methyl modified nucleotide
gctggtacacggcagggtcagttttagagctagaaatagcaagttaaaataaggctagtccgttatcaacttgaaaaagtggcaccgagtcggtgcgtcccacagatatcctgaccctgccg

SEQ ID NO: 16751 - RNA, 129 nt, synthetic construct
  source 1..129: mol_type = other RNA
  modified_base 1: mod_base = OTHER; note = 2'-O-methyl modified nucleotide with phosphorothioate linkage
  modified_base 2: mod_base = OTHER; note = 2'-O-methyl modified nucleotide with phosphorothioate linkage
  modified_base 3: mod_base = OTHER; note = 2'-O-methyl modified nucleotide with phosphorothioate linkage
  modified_base 29: mod_base = OTHER; note = 2'-O-methyl modified nucleotide
  modified_base 30: mod_base = OTHER; note = 2'-O-methyl modified nucleotide
  modified_base 31: mod_base = OTHER; note = 2'-O-methyl modified nucleotide
  modified_base 32: mod_base = OTHER; note = 2'-O-methyl modified nucleotide
  modified_base 33: mod_base = OTHER; note = 2'-O-methyl modified nucleotide
  modified_base 34: mod_base = OTHER; note = 2'-O-methyl modified nucleotide
  modified_base 35: mod_base = OTHER; note = 2'-O-methyl modified nucleotide
  modified_base 36: mod_base = OTHER; note = 2'-O-methyl modified nucleotide
  modified_base 37: mod_base = OTHER; note = 2'-O-methyl modified nucleotide
  modified_base 38: mod_base = OTHER; note = 2'-O-methyl modified nucleotide
  modified_base 39: mod_base = OTHER; note = 2'-O-methyl modified nucleotide
  modified_base 40: mod_base = OTHER; note = 2'-O-methyl modified nucleotide
  modified_base 69: mod_base = OTHER; note = 2'-O-methyl modified nucleotide
  modified_base 70: mod_base = OTHER; note = 2'-O-methyl modified nucleotide
  modified_base 71: mod_base = OTHER; note = 2'-O-methyl modified nucleotide
  modified_base 72: mod_base = OTHER; note = 2'-O-methyl modified nucleotide
  modified_base 73: mod_base = OTHER; note = 2'-O-methyl modified nucleotide
  modified_base 74: mod_base = OTHER; note = 2'-O-methyl modified nucleotide
  modified_base 75: mod_base = OTHER; note = 2'-O-methyl modified nucleotide
  modified_base 76: mod_base = OTHER; note = 2'-O-methyl modified nucleotide
  modified_base 77: mod_base = OTHER; note = 2'-O-methyl modified nucleotide
  modified_base 78: mod_base = OTHER; note = 2'-O-methyl modified nucleotide
  modified_base 79: mod_base = OTHER; note = 2'-O-methyl modified nucleotide
  modified_base 80: mod_base = OTHER; note = 2'-O-methyl modified nucleotide
  modified_base 81: mod_base = OTHER; note = 2'-O-methyl modified nucleotide
  modified_base 82: mod_base = OTHER; note = 2'-O-methyl modified nucleotide
  modified_base 83: mod_base = OTHER; note = 2'-O-methyl modified nucleotide
  modified_base 84: mod_base = OTHER; note = 2'-O-methyl modified nucleotide
  modified_base 85: mod_base = OTHER; note = 2'-O-methyl modified nucleotide
  modified_base 86: mod_base = OTHER; note = 2'-O-methyl modified nucleotide
  modified_base 87: mod_base = OTHER; note = 2'-O-methyl modified nucleotide
  modified_base 88: mod_base = OTHER; note = 2'-O-methyl modified nucleotide
  modified_base 89: mod_base = OTHER; note = 2'-O-methyl modified nucleotide
  modified_base 90: mod_base = OTHER; note = 2'-O-methyl modified nucleotide
  modified_base 91: mod_base = OTHER; note = 2'-O-methyl modified nucleotide
  modified_base 92: mod_base = OTHER; note = 2'-O-methyl modified nucleotide
  modified_base 93: mod_base = OTHER; note = 2'-O-methyl modified nucleotide
  modified_base 94: mod_base = OTHER; note = 2'-O-methyl modified nucleotide
  modified_base 95: mod_base = OTHER; note = 2'-O-methyl modified nucleotide
  modified_base 96: mod_base = OTHER; note = 2'-O-methyl modified nucleotide
  modified_base 126: mod_base = OTHER; note = Nucleotide with phosphorothioate linkage
  modified_base 127: mod_base = OTHER; note = 2'-O-methyl modified nucleotide with phosphorothioate linkage
  modified_base 128: mod_base = OTHER; note = 2'-O-methyl modified nucleotide with phosphorothioate linkage
  modified_base 129: mod_base = OTHER; note = 2'-O-methyl modified nucleotide
gctggtacacggcagggtcagttttagagctagaaatagcaagttaaaataaggctagtccgttatcaacttgaaaaagtggcaccgagtcggtgcttgtcccacagatatcctgaccctgccgtgtac

SEQ ID NO: 16752 - RNA, 128 nt, synthetic construct
  source 1..128: mol_type = other RNA
  modified_base 1: mod_base = OTHER; note = 2'-O-methyl modified nucleotide with phosphorothioate linkage
  modified_base 2: mod_base = OTHER; note = 2'-O-methyl modified nucleotide with phosphorothioate linkage
  modified_base 3: mod_base = OTHER; note = 2'-O-methyl modified nucleotide with phosphorothioate linkage
  modified_base 29: mod_base = OTHER; note = 2'-O-methyl modified nucleotide
  modified_base 30: mod_base = OTHER; note = 2'-O-methyl modified nucleotide
  modified_base 31: mod_base = OTHER; note = 2'-O-methyl modified nucleotide
  modified_base 32: mod_base = OTHER; note = 2'-O-methyl modified nucleotide
  modified_base 33: mod_base = OTHER; note = 2'-O-methyl modified nucleotide
  modified_base 34: mod_base = OTHER; note = 2'-O-methyl modified nucleotide
  modified_base 35: mod_base = OTHER; note = 2'-O-methyl modified nucleotide
  modified_base 36: mod_base = OTHER; note = 2'-O-methyl modified nucleotide
  modified_base 37: mod_base = OTHER; note = 2'-O-methyl modified nucleotide
  modified_base 38: mod_base = OTHER; note = 2'-O-methyl modified nucleotide
  modified_base 39: mod_base = OTHER; note = 2'-O-methyl modified nucleotide
  modified_base 40: mod_base = OTHER; note = 2'-O-methyl modified nucleotide
  modified_base 69: mod_base = OTHER; note = 2'-O-methyl modified nucleotide
  modified_base 70: mod_base = OTHER; note = 2'-O-methyl modified nucleotide
  modified_base 71: mod_base = OTHER; note = 2'-O-methyl modified nucleotide
  modified_base 72: mod_base = OTHER; note = 2'-O-methyl modified nucleotide
  modified_base 73: mod_base = OTHER; note = 2'-O-methyl modified nucleotide
  modified_base 74: mod_base = OTHER; note = 2'-O-methyl modified nucleotide
  modified_base 75: mod_base = OTHER; note = 2'-O-methyl modified nucleotide
  modified_base 76: mod_base = OTHER; note = 2'-O-methyl modified nucleotide
  modified_base 77: mod_base = OTHER; note = 2'-O-methyl modified nucleotide
  modified_base 78: mod_base = OTHER; note = 2'-O-methyl modified nucleotide
  modified_base 79: mod_base = OTHER; note = 2'-O-methyl modified nucleotide
  modified_base 80: mod_base = OTHER; note = 2'-O-methyl modified nucleotide
  modified_base 81: mod_base = OTHER; note = 2'-O-methyl modified nucleotide
  modified_base 82: mod_base = OTHER; note = 2'-O-methyl modified nucleotide
  modified_base 83: mod_base = OTHER; note = 2'-O-methyl modified nucleotide
  modified_base 84: mod_base = OTHER; note = 2'-O-methyl modified nucleotide
  modified_base 85: mod_base = OTHER; note = 2'-O-methyl modified nucleotide
  modified_base 86: mod_base = OTHER; note = 2'-O-methyl modified nucleotide
  modified_base 87: mod_base = OTHER; note = 2'-O-methyl modified nucleotide
  modified_base 88: mod_base = OTHER; note = 2'-O-methyl modified nucleotide
  modified_base 89: mod_base = OTHER; note = 2'-O-methyl modified nucleotide
  modified_base 90: mod_base = OTHER; note = 2'-O-methyl modified nucleotide
  modified_base 91: mod_base = OTHER; note = 2'-O-methyl modified nucleotide
  modified_base 92: mod_base = OTHER; note = 2'-O-methyl modified nucleotide
  modified_base 93: mod_base = OTHER; note = 2'-O-methyl modified nucleotide
  modified_base 94: mod_base = OTHER; note = 2'-O-methyl modified nucleotide
  modified_base 95: mod_base = OTHER; note = 2'-O-methyl modified nucleotide
  modified_base 96: mod_base = OTHER; note = 2'-O-methyl modified nucleotide
  modified_base 125: mod_base = OTHER; note = Nucleotide with phosphorothioate linkage
  modified_base 126: mod_base = OTHER; note = 2'-O-methyl modified nucleotide with phosphorothioate linkage
  modified_base 127: mod_base = OTHER; note = 2'-O-methyl modified nucleotide with phosphorothioate linkage
  modified_base 128: mod_base = OTHER; note = 2'-O-methyl modified nucleotide
gctggtacacggcagggtcagttttagagctagaaatagcaagttaaaataaggctagtccgttatcaacttgaaaaagtggcaccgagtcggtgcttgtcccacagatatcctgaccctgccgtgta

SEQ ID NO: 16753 - RNA, 127 nt, synthetic construct
  source 1..127: mol_type = other RNA
  modified_base 1: mod_base = OTHER; note = 2'-O-methyl modified nucleotide with phosphorothioate linkage
  modified_base 2: mod_base = OTHER; note = 2'-O-methyl modified nucleotide with phosphorothioate linkage
  modified_base 3: mod_base = OTHER; note = 2'-O-methyl modified nucleotide with phosphorothioate linkage
  modified_base 29: mod_base = OTHER; note = 2'-O-methyl modified nucleotide
  modified_base 30: mod_base = OTHER; note = 2'-O-methyl modified nucleotide
  modified_base 31: mod_base = OTHER; note = 2'-O-methyl modified nucleotide
  modified_base 32: mod_base = OTHER; note = 2'-O-methyl modified nucleotide
  modified_base 33: mod_base = OTHER; note = 2'-O-methyl modified nucleotide
  modified_base 34: mod_base = OTHER; note = 2'-O-methyl modified nucleotide
  modified_base 35: mod_base = OTHER; note = 2'-O-methyl modified nucleotide
  modified_base 36: mod_base = OTHER; note = 2'-O-methyl modified nucleotide
  modified_base 37: mod_base = OTHER; note = 2'-O-methyl modified nucleotide
  modified_base 38: mod_base = OTHER; note = 2'-O-methyl modified nucleotide
  modified_base 39: mod_base = OTHER; note = 2'-O-methyl modified nucleotide
  modified_base 40: mod_base = OTHER; note = 2'-O-methyl modified nucleotide
  modified_base 69: mod_base = OTHER; note = 2'-O-methyl modified nucleotide
  modified_base 70: mod_base = OTHER; note = 2'-O-methyl modified nucleotide
  modified_base 71: mod_base = OTHER; note = 2'-O-methyl modified nucleotide
  modified_base 72: mod_base = OTHER; note = 2'-O-methyl modified nucleotide
  modified_base 73: mod_base = OTHER; note = 2'-O-methyl modified nucleotide
  modified_base 74: mod_base = OTHER; note = 2'-O-methyl modified nucleotide
  modified_base 75: mod_base = OTHER; note = 2'-O-methyl modified nucleotide
  modified_base 76: mod_base = OTHER; note = 2'-O-methyl modified nucleotide
  modified_base 77: mod_base = OTHER; note = 2'-O-methyl modified nucleotide
  modified_base 78: mod_base = OTHER; note = 2'-O-methyl modified nucleotide
  modified_base 79: mod_base = OTHER; note = 2'-O-methyl modified nucleotide
  modified_base 80: mod_base = OTHER; note = 2'-O-methyl modified nucleotide
  modified_base 81: mod_base = OTHER; note = 2'-O-methyl modified nucleotide
  modified_base 82: mod_base = OTHER; note = 2'-O-methyl modified nucleotide
  modified_base 83: mod_base = OTHER; note = 2'-O-methyl modified nucleotide
  modified_base 84: mod_base = OTHER; note = 2'-O-methyl modified nucleotide
  modified_base 85: mod_base = OTHER; note = 2'-O-methyl modified nucleotide
  modified_base 86: mod_base = OTHER; note = 2'-O-methyl modified nucleotide
  modified_base 87: mod_base = OTHER; note = 2'-O-methyl modified nucleotide
  modified_base 88: mod_base = OTHER; note = 2'-O-methyl modified nucleotide
  modified_base 89: mod_base = OTHER; note = 2'-O-methyl modified nucleotide
  modified_base 90: mod_base = OTHER; note = 2'-O-methyl modified nucleotide
  modified_base 91: mod_base = OTHER; note = 2'-O-methyl modified nucleotide
  modified_base 92: mod_base = OTHER; note = 2'-O-methyl modified nucleotide
  modified_base 93: mod_base = OTHER; note = 2'-O-methyl modified nucleotide
  modified_base 94: mod_base = OTHER; note = 2'-O-methyl modified nucleotide
  modified_base 95: mod_base = OTHER; note = 2'-O-methyl modified nucleotide
  modified_base 96: mod_base = OTHER; note = 2'-O-methyl modified nucleotide
  modified_base 124: mod_base = OTHER; note = Nucleotide with phosphorothioate linkage
  modified_base 125: mod_base = OTHER; note = 2'-O-methyl modified nucleotide with phosphorothioate linkage
  modified_base 126: mod_base = OTHER; note = 2'-O-methyl modified nucleotide with phosphorothioate linkage
  modified_base 127: mod_base = OTHER; note = 2'-O-methyl modified nucleotide
gctggtacacggcagggtcagttttagagctagaaatagcaagttaaaataaggctagtccgttatcaacttgaaaaagtggcaccgagtcggtgcttgtcccacagatatcctgaccctgccgtgt

SEQ ID NO: 16754 - RNA, 126 nt, synthetic construct
  source 1..126: mol_type = other RNA
  modified_base 1: mod_base = OTHER; note = 2'-O-methyl modified nucleotide with phosphorothioate linkage
  modified_base 2: mod_base = OTHER; note = 2'-O-methyl modified nucleotide with phosphorothioate linkage
  modified_base 3: mod_base = OTHER; note = 2'-O-methyl modified nucleotide with phosphorothioate linkage
  modified_base 29: mod_base = OTHER; note = 2'-O-methyl modified nucleotide
  modified_base 30: mod_base = OTHER; note = 2'-O-methyl modified nucleotide
  modified_base 31: mod_base = OTHER; note = 2'-O-methyl modified nucleotide
  modified_base 32: mod_base = OTHER; note = 2'-O-methyl modified nucleotide
  modified_base 33: mod_base = OTHER; note = 2'-O-methyl modified nucleotide
  modified_base 34: mod_base = OTHER; note = 2'-O-methyl modified nucleotide
  modified_base 35: mod_base = OTHER; note = 2'-O-methyl modified nucleotide
  modified_base 36: mod_base = OTHER; note = 2'-O-methyl modified nucleotide
  modified_base 37: mod_base = OTHER; note = 2'-O-methyl modified nucleotide
  modified_base 38: mod_base = OTHER; note = 2'-O-methyl modified nucleotide
  modified_base 39: mod_base = OTHER; note = 2'-O-methyl modified nucleotide
  modified_base 40: mod_base = OTHER; note = 2'-O-methyl modified nucleotide
  modified_base 69: mod_base = OTHER; note = 2'-O-methyl modified nucleotide
  modified_base 70: mod_base = OTHER; note = 2'-O-methyl modified nucleotide
  modified_base 71: mod_base = OTHER; note = 2'-O-methyl modified nucleotide
  modified_base 72: mod_base = OTHER; note = 2'-O-methyl modified nucleotide
  modified_base 73: mod_base = OTHER; note = 2'-O-methyl modified nucleotide
  modified_base 74: mod_base = OTHER; note = 2'-O-methyl modified nucleotide
  modified_base 75: mod_base = OTHER; note = 2'-O-methyl modified nucleotide
  modified_base 76: mod_base = OTHER; note = 2'-O-methyl modified nucleotide
  modified_base 77: mod_base = OTHER; note = 2'-O-methyl modified nucleotide
  modified_base 78: mod_base = OTHER; note = 2'-O-methyl modified nucleotide
  modified_base 79: mod_base = OTHER; note = 2'-O-methyl modified nucleotide
  modified_base 80: mod_base = OTHER; note = 2'-O-methyl modified nucleotide
  modified_base 81: mod_base = OTHER; note = 2'-O-methyl modified nucleotide
  modified_base 82: mod_base = OTHER; note = 2'-O-methyl modified nucleotide
  modified_base 83: mod_base = OTHER; note = 2'-O-methyl modified nucleotide
  modified_base 84: mod_base = OTHER; note = 2'-O-methyl modified nucleotide
  modified_base 85: mod_base = OTHER; note = 2'-O-methyl modified nucleotide
  modified_base 86: mod_base = OTHER; note = 2'-O-methyl modified nucleotide
  modified_base 87: mod_base = OTHER; note = 2'-O-methyl modified nucleotide
  modified_base 88: mod_base = OTHER; note = 2'-O-methyl modified nucleotide
  modified_base 89: mod_base = OTHER; note = 2'-O-methyl modified nucleotide
  modified_base 90: mod_base = OTHER; note = 2'-O-methyl modified nucleotide
  modified_base 91: mod_base = OTHER; note = 2'-O-methyl modified nucleotide
  modified_base 92: mod_base = OTHER; note = 2'-O-methyl modified nucleotide
  modified_base 93: mod_base = OTHER; note = 2'-O-methyl modified nucleotide
  modified_base 94: mod_base = OTHER; note = 2'-O-methyl modified nucleotide
  modified_base 95: mod_base = OTHER; note = 2'-O-methyl modified nucleotide
  modified_base 96: mod_base = OTHER; note = 2'-O-methyl modified nucleotide
  modified_base 123: mod_base = OTHER; note = Nucleotide with phosphorothioate linkage
  modified_base 124: mod_base = OTHER; note = 2'-O-methyl modified nucleotide with phosphorothioate linkage
  modified_base 125: mod_base = OTHER; note = 2'-O-methyl modified nucleotide with phosphorothioate linkage
  modified_base 126: mod_base = OTHER; note = 2'-O-methyl modified nucleotide
gctggtacacggcagggtcagttttagagctagaaatagcaagttaaaataaggctagtccgttatcaacttgaaaaagtggcaccgagtcggtgcttgtcccacagatatcctgaccctgccgtg

SEQ ID NO: 16755 - RNA, 125 nt, synthetic construct
  source 1..125: mol_type = other RNA
  modified_base 1: mod_base = OTHER; note = 2'-O-methyl modified nucleotide with phosphorothioate linkage
  modified_base 2: mod_base = OTHER; note = 2'-O-methyl modified nucleotide with phosphorothioate linkage
  modified_base 3: mod_base = OTHER; note = 2'-O-methyl modified nucleotide with phosphorothioate linkage
  modified_base 29: mod_base = OTHER; note = 2'-O-methyl modified nucleotide
  modified_base 30: mod_base = OTHER; note = 2'-O-methyl modified nucleotide
  modified_base 31: mod_base = OTHER; note = 2'-O-methyl modified nucleotide
  modified_base 32: mod_base = OTHER; note = 2'-O-methyl modified nucleotide
  modified_base 33: mod_base = OTHER; note = 2'-O-methyl modified nucleotide
  modified_base 34: mod_base = OTHER; note = 2'-O-methyl modified nucleotide
  modified_base 35: mod_base = OTHER; note = 2'-O-methyl modified nucleotide
  modified_base 36: mod_base = OTHER; note = 2'-O-methyl modified nucleotide
  modified_base 37: mod_base = OTHER; note = 2'-O-methyl modified nucleotide
  modified_base 38: mod_base = OTHER; note = 2'-O-methyl modified nucleotide
  modified_base 39: mod_base = OTHER; note = 2'-O-methyl modified nucleotide
  modified_base 40: mod_base = OTHER; note = 2'-O-methyl modified nucleotide
  modified_base 69: mod_base = OTHER; note = 2'-O-methyl modified nucleotide
  modified_base 70: mod_base = OTHER; note = 2'-O-methyl modified nucleotide
  modified_base 71: mod_base = OTHER; note = 2'-O-methyl modified nucleotide
  modified_base 72: mod_base = OTHER; note = 2'-O-methyl modified nucleotide
  modified_base 73: mod_base = OTHER; note = 2'-O-methyl modified nucleotide
  modified_base 74: mod_base = OTHER; note = 2'-O-methyl modified nucleotide
  modified_base 75: mod_base = OTHER; note = 2'-O-methyl modified nucleotide
  modified_base 76: mod_base = OTHER; note = 2'-O-methyl modified nucleotide
  modified_base 77: mod_base = OTHER; note = 2'-O-methyl modified nucleotide
  modified_base 78: mod_base = OTHER; note = 2'-O-methyl modified nucleotide
  modified_base 79: mod_base = OTHER; note = 2'-O-methyl modified nucleotide
  modified_base 80: mod_base = OTHER; note = 2'-O-methyl modified nucleotide
  modified_base 81: mod_base = OTHER; note = 2'-O-methyl modified nucleotide
  modified_base 82: mod_base = OTHER; note = 2'-O-methyl modified nucleotide
  modified_base 83: mod_base = OTHER; note = 2'-O-methyl modified nucleotide
  modified_base 84: mod_base = OTHER; note = 2'-O-methyl modified nucleotide
  modified_base 85: mod_base = OTHER; note = 2'-O-methyl modified nucleotide
  modified_base 86: mod_base = OTHER; note = 2'-O-methyl modified nucleotide
  modified_base 87: mod_base = OTHER; note = 2'-O-methyl modified nucleotide
  modified_base 88: mod_base = OTHER; note = 2'-O-methyl modified nucleotide
  modified_base 89: mod_base = OTHER; note = 2'-O-methyl modified nucleotide
  modified_base 90: mod_base = OTHER; note = 2'-O-methyl modified nucleotide
  modified_base 91: mod_base = OTHER; note = 2'-O-methyl modified nucleotide
  modified_base 92: mod_base = OTHER; note = 2'-O-methyl modified nucleotide
  modified_base 93: mod_base = OTHER; note = 2'-O-methyl modified nucleotide
  modified_base 94: mod_base = OTHER; note = 2'-O-methyl modified nucleotide
  modified_base 95: mod_base = OTHER; note = 2'-O-methyl modified nucleotide
  modified_base 96: mod_base = OTHER; note = 2'-O-methyl modified nucleotide
  modified_base 122: mod_base = OTHER; note = Nucleotide with phosphorothioate linkage
  modified_base 123: mod_base = OTHER; note = 2'-O-methyl modified nucleotide with phosphorothioate linkage
  modified_base 124: mod_base = OTHER; note = 2'-O-methyl modified nucleotide with phosphorothioate linkage
  modified_base 125: mod_base = OTHER; note = 2'-O-methyl modified nucleotide
gctggtacacggcagggtcagttttagagctagaaatagcaagttaaaataaggctagtccgttatcaacttgaaaaagtggcaccgagtcggtgcttgtcccacagatatcctgaccctgccgt

SEQ ID NO: 16756 - RNA, 124 nt, synthetic construct
  source 1..124: mol_type = other RNA
  modified_base 1: mod_base = OTHER; note = 2'-O-methyl modified nucleotide with phosphorothioate linkage
  modified_base 2: mod_base = OTHER; note = 2'-O-methyl modified nucleotide with phosphorothioate linkage
  modified_base 3: mod_base = OTHER; note = 2'-O-methyl modified nucleotide with phosphorothioate linkage
  modified_base 29: mod_base = OTHER; note = 2'-O-methyl modified nucleotide
  modified_base 30: mod_base = OTHER; note = 2'-O-methyl modified nucleotide
  modified_base 31: mod_base = OTHER; note = 2'-O-methyl modified nucleotide
  modified_base 32: mod_base = OTHER; note = 2'-O-methyl modified nucleotide
  modified_base 33: mod_base = OTHER; note = 2'-O-methyl modified nucleotide
  modified_base 34: mod_base = OTHER; note = 2'-O-methyl modified nucleotide
  modified_base 35: mod_base = OTHER; note = 2'-O-methyl modified nucleotide
  modified_base 36: mod_base = OTHER; note = 2'-O-methyl modified nucleotide
  modified_base 37: mod_base = OTHER; note = 2'-O-methyl modified nucleotide
  modified_base 38: mod_base = OTHER; note = 2'-O-methyl modified nucleotide
  modified_base 39: mod_base = OTHER; note = 2'-O-methyl modified nucleotide
  modified_base 40: mod_base = OTHER; note = 2'-O-methyl modified nucleotide
  modified_base 69: mod_base = OTHER; note = 2'-O-methyl modified nucleotide
  modified_base 70: mod_base = OTHER; note = 2'-O-methyl modified nucleotide
  modified_base 71: mod_base = OTHER; note = 2'-O-methyl modified nucleotide
  modified_base 72: mod_base = OTHER; note = 2'-O-methyl modified nucleotide
  modified_base 73: mod_base = OTHER; note = 2'-O-methyl modified nucleotide
  modified_base 74: mod_base = OTHER; note = 2'-O-methyl modified nucleotide
  modified_base 75: mod_base = OTHER; note = 2'-O-methyl modified nucleotide
  modified_base 76: mod_base = OTHER; note = 2'-O-methyl modified nucleotide
  modified_base 77: mod_base = OTHER; note = 2'-O-methyl modified nucleotide
  modified_base 78: mod_base = OTHER; note = 2'-O-methyl modified nucleotide
  modified_base 79: mod_base = OTHER; note = 2'-O-methyl modified nucleotide
  modified_base 80: mod_base = OTHER; note = 2'-O-methyl modified nucleotide
  modified_base 81: mod_base = OTHER; note = 2'-O-methyl modified nucleotide
  modified_base 82: mod_base = OTHER; note = 2'-O-methyl modified nucleotide
  modified_base 83: mod_base = OTHER; note = 2'-O-methyl modified nucleotide
  modified_base 84: mod_base = OTHER; note = 2'-O-methyl modified nucleotide
  modified_base 85: mod_base = OTHER; note = 2'-O-methyl modified nucleotide
  modified_base 86: mod_base = OTHER; note = 2'-O-methyl modified nucleotide
  modified_base 87: mod_base = OTHER; note = 2'-O-methyl modified nucleotide
  modified_base 88: mod_base = OTHER; note = 2'-O-methyl modified nucleotide
  modified_base 89: mod_base = OTHER; note = 2'-O-methyl modified nucleotide
  modified_base 90: mod_base = OTHER; note = 2'-O-methyl modified nucleotide
  modified_base 91: mod_base = OTHER; note = 2'-O-methyl modified nucleotide
  modified_base 92: mod_base = OTHER; note = 2'-O-methyl modified nucleotide
  modified_base 93: mod_base = OTHER; note = 2'-O-methyl modified nucleotide
  modified_base 94: mod_base = OTHER; note = 2'-O-methyl modified nucleotide
  modified_base 95: mod_base = OTHER; note = 2'-O-methyl modified nucleotide
  modified_base 96: mod_base = OTHER; note = 2'-O-methyl modified nucleotide
  modified_base 121: mod_base = OTHER; note = Nucleotide with phosphorothioate linkage
  modified_base 122: mod_base = OTHER; note = 2'-O-methyl modified nucleotide with phosphorothioate linkage
  modified_base 123: mod_base = OTHER; note = 2'-O-methyl modified nucleotide with phosphorothioate linkage
  modified_base 124: mod_base = OTHER; note = 2'-O-methyl modified nucleotide
gctggtacacggcagggtcagttttagagctagaaatagcaagttaaaataaggctagtccgttatcaacttgaaaaagtggcaccgagtcggtgcttgtcccacagatatcctgaccctgccg

SEQ ID NO: 16757 - RNA, 119 nt, synthetic construct; identical to SEQ ID NO: 16001
  source 1..119: mol_type = other RNA

SEQ ID NO: 16758 - RNA, 118 nt, synthetic construct; identical to SEQ ID NO: 16002
  source 1..118: mol_type = other RNA

SEQ ID NO: 16759 - RNA, 117 nt, synthetic construct; identical to SEQ ID NO: 16003
  source 1..117: mol_type = other RNA

SEQ ID NO: 16760 - RNA, 116 nt, synthetic construct; identical to SEQ ID NO: 16004
  source 1..116: mol_type = other RNA

SEQ ID NO: 16761 - RNA, 115 nt, synthetic construct; identical to SEQ ID NO: 16005
  source 1..115: mol_type = other RNA

SEQ ID NO: 16762 - RNA, 114 nt, synthetic construct; identical to SEQ ID NO: 16006
  source 1..114: mol_type = other RNA

SEQ ID NO: 16763 - RNA, 121 nt, synthetic construct; identical to SEQ ID NO: 16007
  source 1..121: mol_type = other RNA

SEQ ID NO: 16764 - RNA, 120 nt, synthetic construct; identical to SEQ ID NO: 16008
  source 1..120: mol_type = other RNA

SEQ ID NO: 16765 - RNA, 119 nt, synthetic construct; identical to SEQ ID NO: 16009
  source 1..119: mol_type = other RNA

SEQ ID NO: 16766 - RNA, 118 nt, synthetic construct; identical to SEQ ID NO: 16010
  source 1..118: mol_type = other RNA

SEQ ID NO: 16767 - RNA, 117 nt, synthetic construct; identical to SEQ ID NO: 16011
  source 1..117: mol_type = other RNA

SEQ ID NO: 16768 - RNA, 116 nt, synthetic construct; identical to SEQ ID NO: 16012
  source 1..116: mol_type = other RNA

SEQ ID NO: 16769 - RNA, 123 nt, synthetic construct; identical to SEQ ID NO: 16013
  source 1..123: mol_type = other RNA

SEQ ID NO: 16770 - RNA, 122 nt, synthetic construct; identical to SEQ ID NO: 16014
  source 1..122: mol_type = other RNA

SEQ ID NO: 16771 - RNA, 121 nt, synthetic construct; identical to SEQ ID NO: 16015
  source 1..121: mol_type = other RNA

SEQ ID NO: 16772 - RNA, 120 nt, synthetic construct; identical to SEQ ID NO: 16016
  source 1..120: mol_type = other RNA

SEQ ID NO: 16773 - RNA, 119 nt, synthetic construct; identical to SEQ ID NO: 16017
  source 1..119: mol_type = other RNA

SEQ ID NO: 16774 - RNA, 118 nt, synthetic construct; identical to SEQ ID NO: 16018
  source 1..118: mol_type = other RNA

SEQ ID NO: 16775 - RNA, 125 nt, synthetic construct; identical to SEQ ID NO: 16019
  source 1..125: mol_type = other RNA

SEQ ID NO: 16776 - RNA, 124 nt, synthetic construct; identical to SEQ ID NO: 16020
  source 1..124: mol_type = other RNA

SEQ ID NO: 16777 - RNA, 123 nt, synthetic construct; identical to SEQ ID NO: 16021
  source 1..123: mol_type = other RNA

SEQ ID NO: 16778 - RNA, 122 nt, synthetic construct; identical to SEQ ID NO: 16022
  source 1..122: mol_type = other RNA

SEQ ID NO: 16779 - RNA, 121 nt, synthetic construct; identical to SEQ ID NO: 16023
  source 1..121: mol_type = other RNA

SEQ ID NO: 16780 - RNA, 120 nt, synthetic construct; identical to SEQ ID NO: 16024
  source 1..120: mol_type = other RNA

SEQ ID NO: 16781 - RNA, 127 nt, synthetic construct; identical to SEQ ID NO: 16025
  source 1..127: mol_type = other RNA

SEQ ID NO: 16782 - RNA, 126 nt, synthetic construct; identical to SEQ ID NO: 16026
  source 1..126: mol_type = other RNA

SEQ ID NO: 16783 - RNA, 125 nt, synthetic construct; identical to SEQ ID NO: 16027
  source 1..125: mol_type = other RNA

SEQ ID NO: 16784 - RNA, 124 nt, synthetic construct; identical to SEQ ID NO: 16028
  source 1..124: mol_type = other RNA

SEQ ID NO: 16785 - RNA, 123 nt, synthetic construct; identical to SEQ ID NO: 15004
  source 1..123: mol_type = other RNA

SEQ ID NO: 16786 - RNA, 122 nt, synthetic construct; identical to SEQ ID NO: 16030
  source 1..122: mol_type = other RNA

SEQ ID NO: 16787 - RNA, 129 nt, synthetic construct; identical to SEQ ID NO: 16031
  source 1..129: mol_type = other RNA

SEQ ID NO: 16788 - RNA, 128 nt, synthetic construct; identical to SEQ ID NO: 16032
  source 1..128: mol_type = other RNA

SEQ ID NO: 16789 - RNA, 127 nt, synthetic construct; identical to SEQ ID NO: 16033
  source 1..127: mol_type = other RNA

SEQ ID NO: 16790 - RNA, 126 nt, synthetic construct; identical to SEQ ID NO: 16034
  source 1..126: mol_type = other RNA

SEQ ID NO: 16791 - RNA, 125 nt, synthetic construct; identical to SEQ ID NO: 16035
  source 1..125: mol_type = other RNA

SEQ ID NO: 16792 - RNA, 124 nt, synthetic construct; identical to SEQ ID NO: 16036
  source 1..124: mol_type = other RNA

SEQ ID NO: 16793 - RNA, 131 nt, synthetic construct; identical to SEQ ID NO: 16037
  source 1..131: mol_type = other RNA

SEQ ID NO: 16794 - RNA, 130 nt, synthetic construct; identical to SEQ ID NO: 16038
  source 1..130: mol_type = other RNA

SEQ ID NO: 16795 - RNA, 129 nt, synthetic construct; identical to SEQ ID NO: 16039
  source 1..129: mol_type = other RNA

SEQ ID NO: 16796 - RNA, 128 nt, synthetic construct; identical to SEQ ID NO: 16040
  source 1..128: mol_type = other RNA

SEQ ID NO: 16797 - RNA, 127 nt, synthetic construct; identical to SEQ ID NO: 16041
  source 1..127: mol_type = other RNA

SEQ ID NO: 16798 - RNA, 126 nt, synthetic construct; identical to SEQ ID NO: 16042
  source 1..126: mol_type = other RNA

SEQ ID NO: 16799 - RNA, 121 nt, synthetic construct; identical to SEQ ID NO: 16043
  source 1..121: mol_type = other RNA

SEQ ID NO: 16800 - RNA, 120 nt, synthetic construct; identical to SEQ ID NO: 16044
  source 1..120: mol_type = other RNA

SEQ ID NO: 16801 - RNA, 119 nt, synthetic construct; identical to SEQ ID NO: 16045
  source 1..119: mol_type = other RNA

SEQ ID NO: 16802 - RNA, 118 nt, synthetic construct; identical to SEQ ID NO: 16046
  source 1..118: mol_type = other RNA

SEQ ID NO: 16803 - RNA, 117 nt, synthetic construct; identical to SEQ ID NO: 16047
  source 1..117: mol_type = other RNA

SEQ ID NO: 16804 - RNA, 116 nt, synthetic construct; identical to SEQ ID NO: 16048
  source 1..116: mol_type = other RNA

SEQ ID NO: 16805 - RNA, 123 nt, synthetic construct; identical to SEQ ID NO: 16049
  source 1..123: mol_type = other RNA

SEQ ID NO: 16806 - RNA, 122 nt, synthetic construct; identical to SEQ ID NO: 16050
  source 1..122: mol_type = other RNA

SEQ ID NO: 16807 - RNA, 121 nt, synthetic construct; identical to SEQ ID NO: 16051
  source 1..121: mol_type = other RNA

SEQ ID NO: 16808 - RNA, 120 nt, synthetic construct; identical to SEQ ID NO: 16052
  source 1..120: mol_type = other RNA

SEQ ID NO: 16809 - RNA, 119 nt, synthetic construct; identical to SEQ ID NO: 16053
  source 1..119: mol_type = other RNA

SEQ ID NO: 16810 - RNA, 118 nt, synthetic construct; identical to SEQ ID NO: 16054
  source 1..118: mol_type = other RNA

SEQ ID NO: 16811 - RNA, 125 nt, synthetic construct; identical to SEQ ID NO: 16055
  source 1..125: mol_type = other RNA

SEQ ID NO: 16812 - RNA, 124 nt, synthetic construct; identical to SEQ ID NO: 16056
  source 1..124: mol_type = other RNA

SEQ ID NO: 16813 - RNA, 123 nt, synthetic construct; identical to SEQ ID NO: 16057
  source 1..123: mol_type = other RNA

SEQ ID NO: 16814 - RNA, 122 nt, synthetic construct; identical to SEQ ID NO: 16058
  source 1..122: mol_type = other RNA

SEQ ID NO: 16815 - RNA, 121 nt, synthetic construct; identical to SEQ ID NO: 16059
  source 1..121: mol_type = other RNA

SEQ ID NO: 16816 - RNA, 120 nt, synthetic construct; identical to SEQ ID NO: 16060
  source 1..120: mol_type = other RNA

SEQ ID NO: 16817 - RNA, 127 nt, synthetic construct; identical to SEQ ID NO: 16061
  source 1..127: mol_type = other RNA

SEQ ID NO: 16818 - RNA, 126 nt, synthetic construct; identical to SEQ ID NO: 16062
  source 1..126: mol_type = other RNA

SEQ ID NO: 16819 - RNA, 125 nt, synthetic construct; identical to SEQ ID NO: 16063
  source 1..125: mol_type = other RNA

SEQ ID NO: 16820 - RNA, 124 nt, synthetic construct; identical to SEQ ID NO: 16064
  source 1..124: mol_type = other RNA

SEQ ID NO: 16821 - RNA, 123 nt, synthetic construct; identical to SEQ ID NO: 16065
  source 1..123: mol_type = other RNA

SEQ ID NO: 16822 - RNA, 122 nt, synthetic construct; identical to SEQ ID NO: 16066
  source 1..122: mol_type = other RNA

SEQ ID NO: 16823 - RNA, 129 nt, synthetic construct; identical to SEQ ID NO: 16067
  source 1..129: mol_type = other RNA

SEQ ID NO: 16824 - RNA, 128 nt, synthetic construct; identical to SEQ ID NO: 16068
  source 1..128: mol_type = other RNA

SEQ ID NO: 16825 - RNA, 127 nt, synthetic construct; identical to SEQ ID NO: 16069
  source 1..127: mol_type = other RNA

SEQ ID NO: 16826 - RNA, 126 nt, synthetic construct; identical to SEQ ID NO: 16070
  source 1..126: mol_type = other RNA

SEQ ID NO: 16827 - RNA, 125 nt, synthetic construct; identical to SEQ ID NO: 16071
  source 1..125: mol_type = other RNA

SEQ ID NO: 16828 - RNA, 124 nt, synthetic construct; identical to SEQ ID NO: 16072
  source 1..124: mol_type = other RNA

SEQ ID NO: 16829 - RNA, 131 nt, synthetic construct; identical to SEQ ID NO: 16073
  source 1..131: mol_type = other RNA

SEQ ID NO: 16830 - RNA, 130 nt, synthetic construct; identical to SEQ ID NO: 16074
  source 1..130: mol_type = other RNA

SEQ ID NO: 16831 - RNA, 129 nt, synthetic construct; identical to SEQ ID NO: 16075
  source 1..129: mol_type = other RNA

SEQ ID NO: 16832 - RNA, 128 nt, synthetic construct; identical to SEQ ID NO: 16076
  source 1..128: mol_type = other RNA

SEQ ID NO: 16833 - RNA, 127 nt, synthetic construct; identical to SEQ ID NO: 16077
  source 1..127: mol_type = other RNA

SEQ ID NO: 16834 - RNA, 126 nt, synthetic construct; identical to SEQ ID NO: 16078
  source 1..126: mol_type = other RNA

SEQ ID NO: 16835 - RNA, 133 nt, synthetic construct; identical to SEQ ID NO: 16079
  source 1..133: mol_type = other RNA

SEQ ID NO: 16836 - RNA, 132 nt, synthetic construct; identical to SEQ ID NO: 16080
  source 1..132: mol_type = other RNA

SEQ ID NO: 16837 - RNA, 131 nt, synthetic construct; identical to SEQ ID NO: 16081
  source 1..131: mol_type = other RNA

SEQ ID NO: 16838 - RNA, 130 nt, synthetic construct; identical to SEQ ID NO: 16082
  source 1..130: mol_type = other RNA

SEQ ID NO: 16839 - RNA, 129 nt, synthetic construct; identical to SEQ ID NO: 16083
  source 1..129: mol_type = other RNA

SEQ ID NO: 16840 - RNA, 128 nt, synthetic construct; identical to SEQ ID NO: 16084
  source 1..128: mol_type = other RNA

SEQ ID NO: 16841 - RNA, 114 nt, synthetic construct; identical to SEQ ID NO: 16085
  source 1..114: mol_type = other RNA

SEQ ID NO: 16842 - RNA, 113 nt, synthetic construct; identical to SEQ ID NO: 16086
  source 1..113: mol_type = other RNA

SEQ ID NO: 16843 - RNA, 112 nt, synthetic construct; identical to SEQ ID NO: 16087
  source 1..112: mol_type = other RNA

SEQ ID NO: 16844 - RNA, 111 nt, synthetic construct; identical to SEQ ID NO: 16088
  source 1..111: mol_type = other RNA

SEQ ID NO: 16845 - RNA, 110 nt, synthetic construct; identical to SEQ ID NO: 16089
  source 1..110: mol_type = other RNA

SEQ ID NO: 16846 - RNA, 109 nt, synthetic construct; identical to SEQ ID NO: 16090
  source 1..109: mol_type = other RNA

SEQ ID NO: 16847 - RNA, 116 nt, synthetic construct; identical to SEQ ID NO: 16091
  source 1..116: mol_type = other RNA

SEQ ID NO: 16848 - RNA, 115 nt, synthetic construct; identical to SEQ ID NO: 16092
  source 1..115: mol_type = other RNA

SEQ ID NO: 16849 - RNA, 114 nt, synthetic construct; identical to SEQ ID NO: 16093
  source 1..114: mol_type = other RNA

SEQ ID NO: 16850 - RNA, 113 nt, synthetic construct; identical to SEQ ID NO: 16094
  source 1..113: mol_type = other RNA

SEQ ID NO: 16851 - RNA, 112 nt, synthetic construct; identical to SEQ ID NO: 16095
  source 1..112: mol_type = other RNA

SEQ ID NO: 16852 - RNA, 111 nt, synthetic construct; identical to SEQ ID NO: 16096
  source 1..111: mol_type = other RNA

SEQ ID NO: 16853 - RNA, 118 nt, synthetic construct; identical to SEQ ID NO: 16097
  source 1..118: mol_type = other RNA

SEQ ID NO: 16854 - RNA, 117 nt, synthetic construct; identical to SEQ ID NO: 16098
  source 1..117: mol_type = other RNA

SEQ ID NO: 16855 - RNA, 116 nt, synthetic construct; identical to SEQ ID NO: 16099
  source 1..116: mol_type = other RNA

SEQ ID NO: 16856 - RNA, 115 nt, synthetic construct; identical to SEQ ID NO: 16100
  source 1..115: mol_type = other RNA

SEQ ID NO: 16857 - RNA, 114 nt, synthetic construct; identical to SEQ ID NO: 16101
  source 1..114: mol_type = other RNA

SEQ ID NO: 16858 - RNA, 113 nt, synthetic construct; identical to SEQ ID NO: 16102
  source 1..113: mol_type = other RNA

SEQ ID NO: 16859 - RNA, 120 nt, synthetic construct; identical to SEQ ID NO: 16103
  source 1..120: mol_type = other RNA

SEQ ID NO: 16860 - RNA, 119 nt, synthetic construct; identical to SEQ ID NO: 16104
  source 1..119: mol_type = other RNA

SEQ ID NO: 16861 - RNA, 118 nt, synthetic construct; identical to SEQ ID NO: 16105
  source 1..118: mol_type = other RNA

SEQ ID NO: 16862 - RNA, 117 nt, synthetic construct; identical to SEQ ID NO: 16106
  source 1..117: mol_type = other RNA

SEQ ID NO: 16863 - RNA, 116 nt, synthetic construct; identical to SEQ ID NO: 16107
  source 1..116: mol_type = other RNA

SEQ ID NO: 16864 - RNA, 115 nt, synthetic construct; identical to SEQ ID NO: 16108
  source 1..115: mol_type = other RNA

SEQ ID NO: 16865 - RNA, 122 nt, synthetic construct; identical to SEQ ID NO: 16109
  source 1..122: mol_type = other RNA

SEQ ID NO: 16866 - RNA, 121 nt, synthetic construct; identical to SEQ ID NO: 16110
  source 1..121: mol_type = other RNA

SEQ ID NO: 16867 - RNA, 120 nt, synthetic construct; identical to SEQ ID NO: 16111
  source 1..120: mol_type = other RNA

SEQ ID NO: 16868 - RNA, 119 nt, synthetic construct; identical to SEQ ID NO: 16112
  source 1..119: mol_type = other RNA

SEQ ID NO: 16869 - RNA, 118 nt, synthetic construct; identical to SEQ ID NO: 16113
  source 1..118: mol_type = other RNA

SEQ ID NO: 16870 - RNA, 117 nt, synthetic construct; identical to SEQ ID NO: 16114
  source 1..117: mol_type = other RNA

SEQ ID NO: 16871 - RNA, 124 nt, synthetic construct; identical to SEQ ID NO: 16115
  source 1..124: mol_type = other RNA

SEQ ID NO: 16872 - RNA, 123 nt, synthetic construct; identical to SEQ ID NO: 16116
  source 1..123: mol_type = other RNA

SEQ ID NO: 16873 - RNA, 122 nt, synthetic construct; identical to SEQ ID NO: 16117
  source 1..122: mol_type = other RNA

SEQ ID NO: 16874 - RNA, 121 nt, synthetic construct; identical to SEQ ID NO: 16118
  source 1..121: mol_type = other RNA

SEQ ID NO: 16875 - RNA, 120 nt, synthetic construct; identical to SEQ ID NO: 16119
  source 1..120: mol_type = other RNA

SEQ ID NO: 16876 - RNA, 119 nt, synthetic construct; identical to SEQ ID NO: 16120
  source 1..119: mol_type = other RNA

SEQ ID NO: 16877 - RNA, 126 nt, synthetic construct; identical to SEQ ID NO: 16121
  source 1..126: mol_type = other RNA

SEQ ID NO: 16878 - RNA, 125 nt, synthetic construct; identical to SEQ ID NO: 16122
  source 1..125: mol_type = other RNA

SEQ ID NO: 16879 - RNA, 124 nt, synthetic construct; identical to SEQ ID NO: 16123
  source 1..124: mol_type = other RNA

SEQ ID NO: 16880 - RNA, 123 nt, synthetic construct; identical to SEQ ID NO: 16124
  source 1..123: mol_type = other RNA

SEQ ID NO: 16881 - RNA, 122 nt, synthetic construct; identical to SEQ ID NO: 16125
  source 1..122: mol_type = other RNA

SEQ ID NO: 16882 - RNA, 121 nt, synthetic construct; identical to SEQ ID NO: 16126
  source 1..121: mol_type = other RNA

SEQ ID NO: 16883 - RNA, 114 nt, synthetic construct; identical to SEQ ID NO: 16127
  source 1..114: mol_type = other RNA

SEQ ID NO: 16884 - RNA, 113 nt, synthetic construct; identical to SEQ ID NO: 16128
  source 1..113: mol_type = other RNA

SEQ ID NO: 16885 - RNA, 112 nt, synthetic construct; identical to SEQ ID NO: 16129
  source 1..112: mol_type = other RNA

SEQ ID NO: 16886 - RNA, 111 nt, synthetic construct; identical to SEQ ID NO: 16130
  source 1..111: mol_type = other RNA

SEQ ID NO: 16887 - RNA, 110 nt, synthetic construct; identical to SEQ ID NO: 16131
  source 1..110: mol_type = other RNA

SEQ ID NO: 16888 - RNA, 109 nt, synthetic construct; identical to SEQ ID NO: 16132
  source 1..109: mol_type = other RNA

SEQ ID NO: 16889 - RNA, 116 nt, synthetic construct; identical to SEQ ID NO: 16133
  source 1..116: mol_type = other RNA

SEQ ID NO: 16890 - RNA, 115 nt, synthetic construct; identical to SEQ ID NO: 16134
  source 1..115: mol_type = other RNA

SEQ ID NO: 16891 - RNA, 114 nt, synthetic construct; identical to SEQ ID NO: 16135
  source 1..114: mol_type = other RNA

SEQ ID NO: 16892 - RNA, 113 nt, synthetic construct; identical to SEQ ID NO: 16136
  source 1..113: mol_type = other RNA

SEQ ID NO: 16893 - RNA, 112 nt, synthetic construct; identical to SEQ ID NO: 16137
  source 1..112: mol_type = other RNA

SEQ ID NO: 16894 - RNA, 111 nt, synthetic construct; identical to SEQ ID NO: 16138
  source 1..111: mol_type = other RNA

SEQ ID NO: 16895 - RNA, 118 nt, synthetic construct; identical to SEQ ID NO: 16139
  source 1..118: mol_type = other RNA

SEQ ID NO: 16896 - RNA, 117 nt, synthetic construct; identical to SEQ ID NO: 16140
  source 1..117: mol_type = other RNA

SEQ ID NO: 16897 - RNA, 116 nt, synthetic construct; identical to SEQ ID NO: 16141
  source 1..116: mol_type = other RNA

SEQ ID NO: 16898 - RNA, 115 nt, synthetic construct; identical to SEQ ID NO: 16142
  source 1..115: mol_type = other RNA

SEQ ID NO: 16899 - RNA, 114 nt, synthetic construct; identical to SEQ ID NO: 16143
  source 1..114: mol_type = other RNA

SEQ ID NO: 16900 - RNA, 113 nt, synthetic construct; identical to SEQ ID NO: 16144
  source 1..113: mol_type = other RNA

SEQ ID NO: 16901 - RNA, 120 nt, synthetic construct; identical to SEQ ID NO: 16145
  source 1..120: mol_type = other RNA

SEQ ID NO: 16902 - RNA, 119 nt, synthetic construct; identical to SEQ ID NO: 16146
  source 1..119: mol_type = other RNA

SEQ ID NO: 16903 - RNA, 118 nt, synthetic construct; identical to SEQ ID NO: 16147
  source 1..118: mol_type = other RNA

SEQ ID NO: 16904 - RNA, 117 nt, synthetic construct; identical to SEQ ID NO: 16148
  source 1..117: mol_type = other RNA

SEQ ID NO: 16905 - RNA, 116 nt, synthetic construct; identical to SEQ ID NO: 16149
  source 1..116: mol_type = other RNA

SEQ ID NO: 16906 - RNA, 115 nt, synthetic construct; identical to SEQ ID NO: 16150
  source 1..115: mol_type = other RNA

SEQ ID NO: 16907 - RNA, 122 nt, synthetic construct; identical to SEQ ID NO: 16151
  source 1..122: mol_type = other RNA

SEQ ID NO: 16908 - RNA, 121 nt, synthetic construct; identical to SEQ ID NO: 16152
  source 1..121: mol_type = other RNA

SEQ ID NO: 16909 - RNA, 120 nt, synthetic construct; identical to SEQ ID NO: 16153
  source 1..120: mol_type = other RNA

SEQ ID NO: 16910 - RNA, 119 nt, synthetic construct; identical to SEQ ID NO: 16154
  source 1..119: mol_type = other RNA

SEQ ID NO: 16911 - RNA, 118 nt, synthetic construct; identical to SEQ ID NO: 16155
  source 1..118: mol_type = other RNA

SEQ ID NO: 16912 - RNA, 117 nt, synthetic construct; identical to SEQ ID NO: 16156
  source 1..117: mol_type = other RNA

SEQ ID NO: 16913 - RNA, 124 nt, synthetic construct; identical to SEQ ID NO: 16157
  source 1..124: mol_type = other RNA

SEQ ID NO: 16914 - RNA, 123 nt, synthetic construct; identical to SEQ ID NO: 16158
  source 1..123: mol_type = other RNA

SEQ ID NO: 16915 - RNA, 122 nt, synthetic construct; identical to SEQ ID NO: 16159
  source 1..122: mol_type = other RNA

SEQ ID NO: 16916 - RNA, 121 nt, synthetic construct; identical to SEQ ID NO: 16160
  source 1..121: mol_type = other RNA

SEQ ID NO: 16917 - RNA, 120 nt, synthetic construct; identical to SEQ ID NO: 16161
  source 1..120: mol_type = other RNA

SEQ ID NO: 16918 - RNA, 119 nt, synthetic construct; identical to SEQ ID NO: 16162
  source 1..119: mol_type = other RNA

SEQ ID NO: 16919 - RNA, 126 nt, synthetic construct; identical to SEQ ID NO: 16163
  source 1..126: mol_type = other RNA

SEQ ID NO: 16920 - RNA, 125 nt, synthetic construct; identical to SEQ ID NO: 16164
  source 1..125: mol_type = other RNA

SEQ ID NO: 16921 - RNA, 124 nt, synthetic construct; identical to SEQ ID NO: 16165
  source 1..124: mol_type = other RNA

SEQ ID NO: 16922 - RNA, 123 nt, synthetic construct; identical to SEQ ID NO: 16166
  source 1..123: mol_type = other RNA

SEQ ID NO: 16923 - RNA, 122 nt, synthetic construct; identical to SEQ ID NO: 16167
  source 1..122: mol_type = other RNA

SEQ ID NO: 16924 - RNA, 121 nt, synthetic construct; identical to SEQ ID NO: 16168
  source 1..121: mol_type = other RNA

SEQ ID NO: 16925 - RNA, 122 nt, synthetic construct; identical to SEQ ID NO: 16169
  source 1..122: mol_type = other RNA

SEQ ID NO: 16926 - RNA, 121 nt, synthetic construct; identical to SEQ ID NO: 16170
  source 1..121: mol_type = other RNA

SEQ ID NO: 16927 - RNA, 120 nt, synthetic construct; identical to SEQ ID NO: 16171
  source 1..120: mol_type = other RNA

SEQ ID NO: 16928 - RNA, 119 nt, synthetic construct; identical to SEQ ID NO: 16172
  source 1..119: mol_type = other RNA

SEQ ID NO: 16929 - RNA, 118 nt, synthetic construct; identical to SEQ ID NO: 16173
  source 1..118: mol_type = other RNA

SEQ ID NO: 16930 - RNA, 117 nt, synthetic construct; identical to SEQ ID NO: 16174
  source 1..117: mol_type = other RNA

SEQ ID NO: 16931 - RNA, 124 nt, synthetic construct; identical to SEQ ID NO: 16175
  source 1..124: mol_type = other RNA

SEQ ID NO: 16932 - RNA, 123 nt, synthetic construct; identical to SEQ ID NO: 16176
  source 1..123: mol_type = other RNA

SEQ ID NO: 16933 - RNA, 122 nt, synthetic construct; identical to SEQ ID NO: 16177
  source 1..122: mol_type = other RNA

SEQ ID NO: 16934 - RNA, 121 nt, synthetic construct; identical to SEQ ID NO: 16178
  source 1..121: mol_type = other RNA

SEQ ID NO: 16935 - RNA, 120 nt, synthetic construct; identical to SEQ ID NO: 16179
  source 1..120: mol_type = other RNA

SEQ ID NO: 16936 - RNA, 119 nt, synthetic construct; identical to SEQ ID NO: 16180
  source 1..119: mol_type = other RNA

SEQ ID NO: 16937 - RNA, 126 nt, synthetic construct; identical to SEQ ID NO: 16181
  source 1..126: mol_type = other RNA

SEQ ID NO: 16938 - RNA, 125 nt, synthetic construct; identical to SEQ ID NO: 16182
  source 1..125: mol_type = other RNA

SEQ ID NO: 16939 - RNA, 124 nt, synthetic construct; identical to SEQ ID NO: 16183
  source 1..124: mol_type = other RNA

SEQ ID NO: 16940 - RNA, 123 nt, synthetic construct; identical to SEQ ID NO: 16184
  source 1..123: mol_type = other RNA

SEQ ID NO: 16941 - RNA, 122 nt, synthetic construct; identical to SEQ ID NO: 16185
  source 1..122: mol_type = other RNA

SEQ ID NO: 16942 - RNA, 121 nt, synthetic construct; identical to SEQ ID NO: 16186
  source 1..121: mol_type = other RNA

SEQ ID NO: 16943 - RNA, 128 nt, synthetic construct; identical to SEQ ID NO: 16187
  source 1..128: mol_type = other RNA

SEQ ID NO: 16944 - RNA, 127 nt, synthetic construct; identical to SEQ ID NO: 16188
  source 1..127: mol_type = other RNA

SEQ ID NO: 16945 - RNA, 126 nt, synthetic construct; identical to SEQ ID NO: 16189
  source 1..126: mol_type = other RNA

SEQ ID NO: 16946 - RNA, 125 nt, synthetic construct; identical to SEQ ID NO: 16190
  source 1..125: mol_type = other RNA

SEQ ID NO: 16947 - RNA, 124 nt, synthetic construct; identical to SEQ ID NO: 16191
  source 1..124: mol_type = other RNA

SEQ ID NO: 16948 - RNA, 123 nt, synthetic construct; identical to SEQ ID NO: 16192
  source 1..123: mol_type = other RNA

SEQ ID NO: 16949 - RNA, 130 nt, synthetic construct; identical to SEQ ID NO: 16193
  source 1..130: mol_type = other RNA

SEQ ID NO: 16950 - RNA, 129 nt, synthetic construct; identical to SEQ ID NO: 16194
  source 1..129: mol_type = other RNA

SEQ ID NO: 16951 - RNA, 128 nt, synthetic construct; identical to SEQ ID NO: 16195
  source 1..128: mol_type = other RNA

SEQ ID NO: 16952 - RNA, 127 nt, synthetic construct; identical to SEQ ID NO: 16196
  source 1..127: mol_type = other RNA

SEQ ID NO: 16953 - RNA, 126 nt, synthetic construct; identical to SEQ ID NO: 16197
  source 1..126: mol_type = other RNA

SEQ ID NO: 16954 - RNA, 125 nt, synthetic construct; identical to SEQ ID NO: 16198
  source 1..125: mol_type = other RNA

SEQ ID NO: 16955 - RNA, 132 nt, synthetic construct; identical to SEQ ID NO: 16199
  source 1..132: mol_type = other RNA

SEQ ID NO: 16956 - RNA, 131 nt, synthetic construct; identical to SEQ ID NO: 16200
  source 1..131: mol_type = other RNA

SEQ ID NO: 16957 - RNA, 130 nt, synthetic construct; identical to SEQ ID NO: 16201
  source 1..130: mol_type = other RNA

SEQ ID NO: 16958 - RNA, 129 nt, synthetic construct; identical to SEQ ID NO: 16202
  source 1..129: mol_type = other RNA

SEQ ID NO: 16959 - RNA, 128 nt, synthetic construct; identical to SEQ ID NO: 16203
  source 1..128: mol_type = other RNA

SEQ ID NO: 16960 - RNA, 127 nt, synthetic construct; identical to SEQ ID NO: 16204
  source 1..127: mol_type = other RNA

SEQ ID NO: 16961 - RNA, 134 nt, synthetic construct; identical to SEQ ID NO: 16205
  source 1..134: mol_type = other RNA

SEQ ID NO: 16962 - RNA, 133 nt, synthetic construct; identical to SEQ ID NO: 16206
  source 1..133: mol_type = other RNA

SEQ ID NO: 16963 - RNA, 132 nt, synthetic construct; identical to SEQ ID NO: 16207
  source 1..132: mol_type = other RNA

SEQ ID NO: 16964 - RNA, 131 nt, synthetic construct; identical to SEQ ID NO: 16208
  source 1..131: mol_type = other RNA

SEQ ID NO: 16965 - RNA, 130 nt, synthetic construct; identical to SEQ ID NO: 16209
  source 1..130: mol_type = other RNA

SEQ ID NO: 16966 - RNA, 129 nt, synthetic construct; identical to SEQ ID NO: 16210
  source 1..129: mol_type = other RNA

SEQ ID NO: 16967 - RNA, 124 nt, synthetic construct; identical to SEQ ID NO: 16211
  source 1..124: mol_type = other RNA

SEQ ID NO: 16968 - RNA, 123 nt, synthetic construct; identical to SEQ ID NO: 16212
  source 1..123: mol_type = other RNA

SEQ ID NO: 16969 - RNA, 122 nt, synthetic construct; identical to SEQ ID NO: 16213
  source 1..122: mol_type = other RNA

SEQ ID NO: 16970 - RNA, 121 nt, synthetic construct; identical to SEQ ID NO: 16214
  source 1..121: mol_type = other RNA

SEQ ID NO: 16971 - RNA, 120 nt, synthetic construct; identical to SEQ ID NO: 16215
  source 1..120: mol_type = other RNA

SEQ ID NO: 16972 - RNA, 119 nt, synthetic construct; identical to SEQ ID NO: 16216
  source 1..119: mol_type = other RNA

SEQ ID NO: 16973 - RNA, 126 nt, synthetic construct; identical to SEQ ID NO: 16217
  source 1..126: mol_type = other RNA

SEQ ID NO: 16974 - RNA, 125 nt, synthetic construct; identical to SEQ ID NO: 16218
  source 1..125: mol_type = other RNA

SEQ ID NO: 16975 - RNA, 124 nt, synthetic construct; identical to SEQ ID NO: 16219
  source 1..124: mol_type = other RNA

SEQ ID NO: 16976 - RNA, 123 nt, synthetic construct; identical to SEQ ID NO: 16220
  source 1..123: mol_type = other RNA

SEQ ID NO: 16977 - RNA, 122 nt, synthetic construct; identical to SEQ ID NO: 16221
  source 1..122: mol_type = other RNA

SEQ ID NO: 16978 - RNA, 121 nt, synthetic construct; identical to SEQ ID NO: 16222
  source 1..121: mol_type = other RNA

SEQ ID NO: 16979 - RNA, 128 nt, synthetic construct; identical to SEQ ID NO: 16223
  source 1..128: mol_type = other RNA

SEQ ID NO: 16980 - RNA, 127 nt, synthetic construct; identical to SEQ ID NO: 16224
  source 1..127: mol_type = other RNA

SEQ ID NO: 16981 - RNA, 126 nt, synthetic construct; identical to SEQ ID NO: 16225
  source 1..126: mol_type = other RNA

SEQ ID NO: 16982 - RNA, 125 nt, synthetic construct; identical to SEQ ID NO: 16226
  source 1..125: mol_type = other RNA

SEQ ID NO: 16983 - RNA, 124 nt, synthetic construct; identical to SEQ ID NO: 16227
  source 1..124: mol_type = other RNA

SEQ ID NO: 16984 - RNA, 123 nt, synthetic construct; identical to SEQ ID NO: 16228
  source 1..123: mol_type = other RNA

SEQ ID NO: 16985 - RNA, 130 nt, synthetic construct; identical to SEQ ID NO: 16229
  source 1..130: mol_type = other RNA

SEQ ID NO: 16986 - RNA, 129 nt, synthetic construct; identical to SEQ ID NO: 16230
  source 1..129: mol_type = other RNA

SEQ ID NO: 16987 - RNA, 128 nt, synthetic construct; identical to SEQ ID NO: 16231
  source 1..128: mol_type = other RNA

SEQ ID NO: 16988 - RNA, 127 nt, synthetic construct; identical to SEQ ID NO: 16232
  source 1..127: mol_type = other RNA

SEQ ID NO: 16989 - RNA, 126 nt, synthetic construct; identical to SEQ ID NO: 16233
  source 1..126: mol_type = other RNA

SEQ ID NO: 16990 - RNA, 125 nt, synthetic construct; identical to SEQ ID NO: 16234
  source 1..125: mol_type = other RNA

SEQ ID NO: 16991 - RNA, 132 nt, synthetic construct; identical to SEQ ID NO: 16235
  source 1..132: mol_type = other RNA

SEQ ID NO: 16992 - RNA, 131 nt, synthetic construct; identical to SEQ ID NO: 16236
  source 1..131: mol_type = other RNA

SEQ ID NO: 16993 - RNA, 130 nt, synthetic construct; identical to SEQ ID NO: 16237
  source 1..130: mol_type = other RNA

SEQ ID NO: 16994 - RNA, 129 nt, synthetic construct; identical to SEQ ID NO: 16238
  source 1..129: mol_type = other RNA

SEQ ID NO: 16995 - RNA, 128 nt, synthetic construct; identical to SEQ ID NO: 16239
  source 1..128: mol_type = other RNA

SEQ ID NO: 16996 - RNA, 127 nt, synthetic construct; identical to SEQ ID NO: 16240
  source 1..127: mol_type = other RNA

SEQ ID NO: 16997 - RNA, 134 nt, synthetic construct; identical to SEQ ID NO: 16241
  source 1..134: mol_type = other RNA

SEQ ID NO: 16998 - RNA, 133 nt, synthetic construct; identical to SEQ ID NO: 16242
  source 1..133: mol_type = other RNA

SEQ ID NO: 16999 - RNA, 132 nt, synthetic construct; identical to SEQ ID NO: 16243
  source 1..132: mol_type = other RNA

SEQ ID NO: 17000 - RNA, 131 nt, synthetic construct; identical to SEQ ID NO: 16244
  source 1..131: mol_type = other RNA

SEQ ID NO: 17001 - RNA, 130 nt, synthetic construct; identical to SEQ ID NO: 16245
  source 1..130: mol_type = other RNA

SEQ ID NO: 17002 - RNA, 129 nt, synthetic construct; identical to SEQ ID NO: 16246
  source 1..129: mol_type = other RNA

SEQ ID NO: 17003 - RNA, 136 nt, synthetic construct; identical to SEQ ID NO: 16247
  source 1..136: mol_type = other RNA

SEQ ID NO: 17004 - RNA, 135 nt, synthetic construct; identical to SEQ ID NO: 16248
  source 1..135: mol_type = other RNA

SEQ ID NO: 17005 - RNA, 134 nt, synthetic construct; identical to SEQ ID NO: 16249
  source 1..134: mol_type = other RNA

SEQ ID NO: 17006 - RNA, 133 nt, synthetic construct; identical to SEQ ID NO: 16250
  source 1..133: mol_type = other RNA

SEQ ID NO: 17007 - RNA, 132 nt, synthetic construct; identical to SEQ ID NO: 16251
  source 1..132: mol_type = other RNA

SEQ ID NO: 17008 - RNA, 131 nt, synthetic construct; identical to SEQ ID NO: 16252
  source 1..131: mol_type = other RNA

SEQ ID NO: 17009 - RNA, 117 nt, synthetic construct; identical to SEQ ID NO: 16253
  source 1..117: mol_type = other RNA

SEQ ID NO: 17010 - RNA, 116 nt, synthetic construct; identical to SEQ ID NO: 16254
  source 1..116: mol_type = other RNA

SEQ ID NO: 17011 - RNA, 115 nt, synthetic construct; identical to SEQ ID NO: 16255
  source 1..115: mol_type = other RNA

SEQ ID NO: 17012 - RNA, 114 nt, synthetic construct; identical to SEQ ID NO: 16256
  source 1..114: mol_type = other RNA

SEQ ID NO: 17013 - RNA, 113 nt, synthetic construct; identical to SEQ ID NO: 16257
  source 1..113: mol_type = other RNA

SEQ ID NO: 17014 - RNA, 112 nt, synthetic construct; identical to SEQ ID NO: 16258
  source 1..112: mol_type = other RNA

SEQ ID NO: 17015 - RNA, 119 nt, synthetic construct; identical to SEQ ID NO: 16259
  source 1..119: mol_type = other RNA

SEQ ID NO: 17016 - RNA, 118 nt, synthetic construct; identical to SEQ ID NO: 16260
  source 1..118: mol_type = other RNA

SEQ ID NO: 17017 - RNA, 117 nt, synthetic construct; identical to SEQ ID NO: 16261
  source 1..117: mol_type = other RNA

SEQ ID NO: 17018 - RNA, 116 nt, synthetic construct; identical to SEQ ID NO: 16262
  source 1..116: mol_type = other RNA

SEQ ID NO: 17019 - RNA, 115 nt, synthetic construct; identical to SEQ ID NO: 16263
  source 1..115: mol_type = other RNA

SEQ ID NO: 17020 - RNA, 114 nt, synthetic construct; identical to SEQ ID NO: 16264
  source 1..114: mol_type = other RNA

SEQ ID NO: 17021 - RNA, 121 nt, synthetic construct; identical to SEQ ID NO: 16265
  source 1..121: mol_type = other RNA

SEQ ID NO: 17022 - RNA, 120 nt, synthetic construct; identical to SEQ ID NO: 16266
  source 1..120: mol_type = other RNA

SEQ ID NO: 17023 - RNA, 119 nt, synthetic construct; identical to SEQ ID NO: 16267
  source 1..119: mol_type = other RNA

SEQ ID NO: 17024 - RNA, 118 nt, synthetic construct; identical to SEQ ID NO: 16268
  source 1..118: mol_type = other RNA

SEQ ID NO: 17025 - RNA, 117 nt, synthetic construct; identical to SEQ ID NO: 16269
  source 1..117: mol_type = other RNA

SEQ ID NO: 17026 - RNA, 116 nt, synthetic construct; identical to SEQ ID NO: 16270
  source 1..116: mol_type = other RNA

SEQ ID NO: 17027 - RNA, 123 nt, synthetic construct; identical to SEQ ID NO: 16271
  source 1..123: mol_type = other RNA

SEQ ID NO: 17028 - RNA, 122 nt, synthetic construct; identical to SEQ ID NO: 16272
  source 1..122: mol_type = other RNA

SEQ ID NO: 17029 - RNA, 121 nt, synthetic construct; identical to SEQ ID NO: 16273
  source 1..121: mol_type = other RNA

SEQ ID NO: 17030 - RNA, 120 nt, synthetic construct; identical to SEQ ID NO: 16274
  source 1..120: mol_type = other RNA

SEQ ID NO: 17031 - RNA, 119 nt, synthetic construct; identical to SEQ ID NO: 16275
  source 1..119: mol_type = other RNA

SEQ ID NO: 17032 - RNA, 118 nt, synthetic construct; identical to SEQ ID NO: 16276
  source 1..118: mol_type = other RNA

SEQ ID NO: 17033 - RNA, 125 nt, synthetic construct; identical to SEQ ID NO: 16277
  source 1..125: mol_type = other RNA

SEQ ID NO: 17034 - RNA, 124 nt, synthetic construct; identical to SEQ ID NO: 16278
  source 1..124: mol_type = other RNA

SEQ ID NO: 17035 - RNA, 123 nt, synthetic construct; identical to SEQ ID NO: 16279
  source 1..123: mol_type = other RNA

SEQ ID NO: 17036 - RNA, 122 nt, synthetic construct; identical to SEQ ID NO: 16280
  source 1..122: mol_type = other RNA

SEQ ID NO: 17037 - RNA, 121 nt, synthetic construct; identical to SEQ ID NO: 16281
  source 1..121: mol_type = other RNA

SEQ ID NO: 17038 - RNA, 120 nt, synthetic construct; identical to SEQ ID NO: 16282
  source 1..120: mol_type = other RNA

SEQ ID NO: 17039 - RNA, 127 nt, synthetic construct; identical to SEQ ID NO: 16283
  source 1..127: mol_type = other RNA

SEQ ID NO: 17040 - RNA, 126 nt, synthetic construct; identical to SEQ ID NO: 16284
  source 1..126: mol_type = other RNA

SEQ ID NO: 17041 - RNA, 125 nt, synthetic construct; identical to SEQ ID NO: 16285
  source 1..125: mol_type = other RNA

SEQ ID NO: 17042 - RNA, 124 nt, synthetic construct; identical to SEQ ID NO: 16286
  source 1..124: mol_type = other RNA

SEQ ID NO: 17043 - RNA, 123 nt, synthetic construct; identical to SEQ ID NO: 16287
  source 1..123: mol_type = other RNA

SEQ ID NO: 17044 - RNA, 122 nt, synthetic construct; identical to SEQ ID NO: 16288
  source 1..122: mol_type = other RNA

SEQ ID NO: 17045 - RNA, 129 nt, synthetic construct; identical to SEQ ID NO: 16289
  source 1..129: mol_type = other RNA

SEQ ID NO: 17046 - RNA, 128 nt, synthetic construct; identical to SEQ ID NO: 16290
  source 1..128: mol_type = other RNA

SEQ ID NO: 17047 - RNA, 127 nt, synthetic construct; identical to SEQ ID NO: 16291
  source 1..127: mol_type = other RNA

SEQ ID NO: 17048 - RNA, 126 nt, synthetic construct; identical to SEQ ID NO: 16292
  source 1..126: mol_type = other RNA

SEQ ID NO: 17049 - RNA, 125 nt, synthetic construct; identical to SEQ ID NO: 16293
  source 1..125: mol_type = other RNA

SEQ ID NO: 17050 - RNA, 124 nt, synthetic construct; identical to SEQ ID NO: 16294
  source 1..124: mol_type = other RNA

SEQ ID NO: 17051 - RNA, 117 nt, synthetic construct; identical to SEQ ID NO: 16295
  source 1..117: mol_type = other RNA

SEQ ID NO: 17052 - RNA, 116 nt, synthetic construct; identical to SEQ ID NO: 16296
  source 1..116: mol_type = other RNA

SEQ ID NO: 17053 - RNA, 115 nt, synthetic construct; identical to SEQ ID NO: 16297
  source 1..115: mol_type = other RNA

SEQ ID NO: 17054 - RNA, 114 nt, synthetic construct; identical to SEQ ID NO: 16298
  source 1..114: mol_type = other RNA

SEQ ID NO: 17055 - RNA, 113 nt, synthetic construct; identical to SEQ ID NO: 16299
  source 1..113: mol_type = other RNA

SEQ ID NO: 17056 - RNA, 112 nt, synthetic construct; identical to SEQ ID NO: 16300
  source 1..112: mol_type = other RNA

SEQ ID NO: 17057 - RNA, 119 nt, synthetic construct; identical to SEQ ID NO: 16301
  source 1..119: mol_type = other RNA

SEQ ID NO: 17058 - RNA, 118 nt, synthetic construct; identical to SEQ ID NO: 16302
  source 1..118: mol_type = other RNA

SEQ ID NO: 17059 - RNA, 117 nt, synthetic construct; identical to SEQ ID NO: 16303
  source 1..117: mol_type = other RNA

SEQ ID NO: 17060 - RNA, 116 nt, synthetic construct; identical to SEQ ID NO: 16304
  source 1..116: mol_type = other RNA

SEQ ID NO: 17061 - RNA, 115 nt, synthetic construct; identical to SEQ ID NO: 16305
  source 1..115: mol_type = other RNA

SEQ ID NO: 17062 - RNA, 114 nt, synthetic construct; identical to SEQ ID NO: 16306
  source 1..114: mol_type = other RNA

SEQ ID NO: 17063 - RNA, 121 nt, synthetic construct; identical to SEQ ID NO: 16307
  source 1..121: mol_type = other RNA

SEQ ID NO: 17064 - RNA, 120 nt, synthetic construct; identical to SEQ ID NO: 16308
  source 1..120: mol_type = other RNA

SEQ ID NO: 17065 - RNA, 119 nt, synthetic construct; identical to SEQ ID NO: 16309
  source 1..119: mol_type = other RNA

SEQ ID NO: 17066 - RNA, 118 nt, synthetic construct; identical to SEQ ID NO: 16310
  source 1..118: mol_type = other RNA

SEQ ID NO: 17067 - RNA, 117 nt, synthetic construct; identical to SEQ ID NO: 16311
  source 1..117: mol_type = other RNA

SEQ ID NO: 17068 - RNA, 116 nt, synthetic construct; identical to SEQ ID NO: 16312
  source 1..116: mol_type = other RNA

SEQ ID NO: 17069 - RNA, 123 nt, synthetic construct; identical to SEQ ID NO: 16313
  source 1..123: mol_type = other RNA

SEQ ID NO: 17070 - RNA, 122 nt, synthetic construct; identical to SEQ ID NO: 16314
  source 1..122: mol_type = other RNA

SEQ ID NO: 17071 - RNA, 121 nt, synthetic construct; identical to SEQ ID NO: 16315
  source 1..121: mol_type = other RNA

SEQ ID NO: 17072 - RNA, 120 nt, synthetic construct; identical to SEQ ID NO: 16316
  source 1..120: mol_type = other RNA

SEQ ID NO: 17073 - RNA, 119 nt, synthetic construct; identical to SEQ ID NO: 16317
  source 1..119: mol_type = other RNA

SEQ ID NO: 17074 - RNA, 118 nt, synthetic construct; identical to SEQ ID NO: 16318
  source 1..118: mol_type = other RNA

SEQ ID NO: 17075 - RNA, 125 nt, synthetic construct; identical to SEQ ID NO: 16319
  source 1..125: mol_type = other RNA

SEQ ID NO: 17076 - RNA, 124 nt, synthetic construct; identical to SEQ ID NO: 16320
  source 1..124: mol_type = other RNA

SEQ ID NO: 17077 - RNA, 123 nt, synthetic construct; identical to SEQ ID NO: 16321
  source 1..123: mol_type = other RNA

SEQ ID NO: 17078 - RNA, 122 nt, synthetic construct; identical to SEQ ID NO: 16322
  source 1..122: mol_type = other RNA

SEQ ID NO: 17079 - RNA, 121 nt, synthetic construct; identical to SEQ ID NO: 16323
  source 1..121: mol_type = other RNA

SEQ ID NO: 17080 - RNA, 120 nt, synthetic construct; identical to SEQ ID NO: 16324
  source 1..120: mol_type = other RNA

SEQ ID NO: 17081 - RNA, 127 nt, synthetic construct; identical to SEQ ID NO: 16325
  source 1..127: mol_type = other RNA

SEQ ID NO: 17082 - RNA, 126 nt, synthetic construct; identical to SEQ ID NO: 16326
  source 1..126: mol_type = other RNA

SEQ ID NO: 17083 - RNA, 125 nt, synthetic construct; identical to SEQ ID NO: 16327
  source 1..125: mol_type = other RNA

SEQ ID NO: 17084 - RNA, 124 nt, synthetic construct; identical to SEQ ID NO: 16328
  source 1..124: mol_type = other RNA

SEQ ID NO: 17085 - RNA, 123 nt, synthetic construct; identical to SEQ ID NO: 16329
  source 1..123: mol_type = other RNA

SEQ ID NO: 17086 - RNA, 122 nt, synthetic construct; identical to SEQ ID NO: 16330
  source 1..122: mol_type = other RNA

SEQ ID NO: 17087 - RNA, 129 nt, synthetic construct; identical to SEQ ID NO: 16331
  source 1..129: mol_type = other RNA

SEQ ID NO: 17088 - RNA, 128 nt, synthetic construct; identical to SEQ ID NO: 16332
  source 1..128: mol_type = other RNA

SEQ ID NO: 17089 - RNA, 127 nt, synthetic construct; identical to SEQ ID NO: 16333
  source 1..127: mol_type = other RNA

SEQ ID NO: 17090 - RNA, 126 nt, synthetic construct; identical to SEQ ID NO: 16334
  source 1..126: mol_type = other RNA

SEQ ID NO: 17091 - RNA, 125 nt, synthetic construct; identical to SEQ ID NO: 16335
  source 1..125: mol_type = other RNA

SEQ ID NO: 17092 - RNA, 124 nt, synthetic construct; identical to SEQ ID NO: 16336
  source 1..124: mol_type = other RNA

SEQ ID NO: 17093 - RNA, 119 nt, synthetic construct; identical to SEQ ID NO: 16337
  source 1..119: mol_type = other RNA

SEQ ID NO: 17094 - RNA, 118 nt, synthetic construct; identical to SEQ ID NO: 16338
  source 1..118: mol_type = other RNA

SEQ ID NO: 17095 - RNA, 117 nt, synthetic construct; identical to SEQ ID NO: 16339
  source 1..117: mol_type = other RNA

SEQ ID NO: 17096 - RNA, 116 nt, synthetic construct; identical to SEQ ID NO: 16340
  source 1..116: mol_type = other RNA

SEQ ID NO: 17097 - RNA, 115 nt, synthetic construct; identical to SEQ ID NO: 16341
  source 1..115: mol_type = other RNA

SEQ ID NO: 17098 - RNA, 114 nt, synthetic construct; identical to SEQ ID NO: 16342
  source 1..114: mol_type = other RNA

SEQ ID NO: 17099 - RNA, 121 nt, synthetic construct; identical to SEQ ID NO: 16343
  source 1..121: mol_type = other RNA

SEQ ID NO: 17100 - RNA, 120 nt, synthetic construct; identical to SEQ ID NO: 16344
  source 1..120: mol_type = other RNA

SEQ ID NO: 17101 - RNA, 119 nt, synthetic construct; identical to SEQ ID NO: 16345
  source 1..119: mol_type = other RNA

SEQ ID NO: 17102 - RNA, 118 nt, synthetic construct; identical to SEQ ID NO: 16346
  source 1..118: mol_type = other RNA

SEQ ID NO: 17103 - RNA, 117 nt, synthetic construct; identical to SEQ ID NO: 16347
  source 1..117: mol_type = other RNA

SEQ ID NO: 17104 - RNA, 116 nt, synthetic construct; identical to SEQ ID NO: 16348
  source 1..116: mol_type = other RNA

SEQ ID NO: 17105 - RNA, 123 nt, synthetic construct; identical to SEQ ID NO: 16349
  source 1..123: mol_type = other RNA

SEQ ID NO: 17106 - RNA, 122 nt, synthetic construct; identical to SEQ ID NO: 16350
  source 1..122: mol_type = other RNA

SEQ ID NO: 17107 - RNA, 121 nt, synthetic construct; identical to SEQ ID NO: 16351
  source 1..121: mol_type = other RNA

SEQ ID NO: 17108 - RNA, 120 nt, synthetic construct; identical to SEQ ID NO: 16352
  source 1..120: mol_type = other RNA

SEQ ID NO: 17109 - RNA, 119 nt, synthetic construct; identical to SEQ ID NO: 16353
  source 1..119: mol_type = other RNA

SEQ ID NO: 17110 - RNA, 118 nt, synthetic construct; identical to SEQ ID NO: 16354
  source 1..118: mol_type = other RNA

SEQ ID NO: 17111 - RNA, 125 nt, synthetic construct; identical to SEQ ID NO: 16355
  source 1..125: mol_type = other RNA

SEQ ID NO: 17112 - RNA, 124 nt, synthetic construct; identical to SEQ ID NO: 16356
  source 1..124: mol_type = other RNA

SEQ ID NO: 17113 - RNA, 123 nt, synthetic construct; identical to SEQ ID NO: 16357
  source 1..123: mol_type = other RNA

SEQ ID NO: 17114 - RNA, 122 nt, synthetic construct; identical to SEQ ID NO: 16358
  source 1..122: mol_type = other RNA

SEQ ID NO: 17115 - RNA, 121 nt, synthetic construct; identical to SEQ ID NO: 16359
  source 1..121: mol_type = other RNA

SEQ ID NO: 17116 - RNA, 120 nt, synthetic construct; identical to SEQ ID NO: 16360
  source 1..120: mol_type = other RNA

SEQ ID NO: 17117 - RNA, 127 nt, synthetic construct; identical to SEQ ID NO: 16361
  source 1..127: mol_type = other RNA

SEQ ID NO: 17118 - RNA, 126 nt, synthetic construct; identical to SEQ ID NO: 16362
  source 1..126: mol_type = other RNA

SEQ ID NO: 17119 - RNA, 125 nt, synthetic construct; identical to SEQ ID NO: 16363
  source 1..125: mol_type = other RNA

SEQ ID NO: 17120 - RNA, 124 nt, synthetic construct; identical to SEQ ID NO: 16364
  source 1..124: mol_type = other RNA

SEQ ID NO: 17121 - RNA, 123 nt, synthetic construct; identical to SEQ ID NO: 16365
  source 1..123: mol_type = other RNA

SEQ ID NO: 17122 - RNA, 122 nt, synthetic construct; identical to SEQ ID NO: 16366
  source 1..122: mol_type = other RNA

SEQ ID NO: 17123 - RNA, 129 nt, synthetic construct; identical to SEQ ID NO: 16367
  source 1..129: mol_type = other RNA

SEQ ID NO: 17124 - RNA, 128 nt, synthetic construct; identical to SEQ ID NO: 16368
  source 1..128: mol_type = other RNA

SEQ ID NO: 17125 - RNA, 127 nt, synthetic construct; identical to SEQ ID NO: 16369
  source 1..127: mol_type = other RNA

SEQ ID NO: 17126 - RNA, 126 nt, synthetic construct; identical to SEQ ID NO: 16370
  source 1..126: mol_type = other RNA

SEQ ID NO: 17127 - RNA, 125 nt, synthetic construct; identical to SEQ ID NO: 16371
  source 1..125: mol_type = other RNA

SEQ ID NO: 17128 - RNA, 124 nt, synthetic construct; identical to SEQ ID NO: 16372
  source 1..124: mol_type = other RNA

SEQ ID NO: 17129 - RNA, 131 nt, synthetic construct; identical to SEQ ID NO: 16373
  source 1..131: mol_type = other RNA

SEQ ID NO: 17130 - RNA, 130 nt, synthetic construct; identical to SEQ ID NO: 16374
  source 1..130: mol_type = other RNA

SEQ ID NO: 17131 - RNA, 129 nt, synthetic construct; identical to SEQ ID NO: 16375
  source 1..129: mol_type = other RNA

SEQ ID NO: 17132 - RNA, 128 nt, synthetic construct; identical to SEQ ID NO: 16376
  source 1..128: mol_type = other RNA

SEQ ID NO: 17133 - RNA, 127 nt, synthetic construct; identical to SEQ ID NO: 16377
  source 1..127: mol_type = other RNA

SEQ ID NO: 17134 - RNA, 126 nt, synthetic construct; identical to SEQ ID NO: 16378
  source 1..126: mol_type = other RNA

SEQ ID NO: 17135 - RNA, 119 nt, synthetic construct; identical to SEQ ID NO: 16379
  source 1..119: mol_type = other RNA

SEQ ID NO: 17136 - RNA, 118 nt, synthetic construct; identical to SEQ ID NO: 16380
  source 1..118: mol_type = other RNA

SEQ ID NO: 17137 - RNA, 117 nt, synthetic construct; identical to SEQ ID NO: 16381
  source 1..117: mol_type = other RNA

SEQ ID NO: 17138 - RNA, 116 nt, synthetic construct; identical to SEQ ID NO: 16382
  source 1..116: mol_type = other RNA

SEQ ID NO: 17139 - RNA, 115 nt, synthetic construct; identical to SEQ ID NO: 16383
  source 1..115: mol_type = other RNA

SEQ ID NO: 17140 - RNA, 114 nt, synthetic construct; identical to SEQ ID NO: 16384
  source 1..114: mol_type = other RNA

SEQ ID NO: 17141 - RNA, 121 nt, synthetic construct; identical to SEQ ID NO: 16385
  source 1..121: mol_type = other RNA

SEQ ID NO: 17142 - RNA, 120 nt, synthetic construct; identical to SEQ ID NO: 16386
  source 1..120: mol_type = other RNA

SEQ ID NO: 17143 - RNA, 119 nt, synthetic construct; identical to SEQ ID NO: 16387
  source 1..119: mol_type = other RNA

SEQ ID NO: 17144 - RNA, 118 nt, synthetic construct; identical to SEQ ID NO: 16388
  source 1..118: mol_type = other RNA

SEQ ID NO: 17145 - RNA, 117 nt, synthetic construct; identical to SEQ ID NO: 16389
  source 1..117: mol_type = other RNA

SEQ ID NO: 17146 - RNA, 116 nt, synthetic construct; identical to SEQ ID NO: 16390
  source 1..116: mol_type = other RNA

SEQ ID NO: 17147 - RNA, 123 nt, synthetic construct; identical to SEQ ID NO: 16391
  source 1..123: mol_type = other RNA

SEQ ID NO: 17148 - RNA, 122 nt, synthetic construct; identical to SEQ ID NO: 16392
  source 1..122: mol_type = other RNA

SEQ ID NO: 17149 - RNA, 121 nt, synthetic construct; identical to SEQ ID NO: 16393
  source 1..121: mol_type = other RNA

SEQ ID NO: 17150 - RNA, 120 nt, synthetic construct; identical to SEQ ID NO: 16394
  source 1..120: mol_type = other RNA

SEQ ID NO: 17151 - RNA, 119 nt, synthetic construct; identical to SEQ ID NO: 16395
  source 1..119: mol_type = other RNA

SEQ ID NO: 17152 - RNA, 118 nt, synthetic construct; identical to SEQ ID NO: 16396
  source 1..118: mol_type = other RNA

SEQ ID NO: 17153 - RNA, 125 nt, synthetic construct; identical to SEQ ID NO: 16397
  source 1..125: mol_type = other RNA

SEQ ID NO: 17154 - RNA, 124 nt, synthetic construct; identical to SEQ ID NO: 16398
  source 1..124: mol_type = other RNA

SEQ ID NO: 17155 - RNA, 123 nt, synthetic construct; identical to SEQ ID NO: 16399
  source 1..123: mol_type = other RNA

SEQ ID NO: 17156 - RNA, 122 nt, synthetic construct; identical to SEQ ID NO: 16400
  source 1..122: mol_type = other RNA

SEQ ID NO: 17157 - RNA, 121 nt, synthetic construct; identical to SEQ ID NO: 16401
  source 1..121: mol_type = other RNA

SEQ ID NO: 17158 - RNA, 120 nt, synthetic construct; identical to SEQ ID NO: 16402
  source 1..120: mol_type = other RNA

SEQ ID NO: 17159 - RNA, 127 nt, synthetic construct; identical to SEQ ID NO: 16403
  source 1..127: mol_type = other RNA

SEQ ID NO: 17160 - RNA, 126 nt, synthetic construct; identical to SEQ ID NO: 16404
  source 1..126: mol_type = other RNA

SEQ ID NO: 17161 - RNA, 125 nt, synthetic construct; identical to SEQ ID NO: 16405
  source 1..125: mol_type = other RNA

SEQ ID NO: 17162 - RNA, 124 nt, synthetic construct; identical to SEQ ID NO: 16406
  source 1..124: mol_type = other RNA

SEQ ID NO: 17163 - RNA, 123 nt, synthetic construct; identical to SEQ ID NO: 16407
  source 1..123: mol_type = other RNA

SEQ ID NO: 17164 - RNA, 122 nt, synthetic construct; identical to SEQ ID NO: 16408
  source 1..122: mol_type = other RNA

SEQ ID NO: 17165 - RNA, 129 nt, synthetic construct; identical to SEQ ID NO: 16409
  source 1..129: mol_type = other RNA

SEQ ID NO: 17166 - RNA, 128 nt, synthetic construct; identical to SEQ ID NO: 16410
  source 1..128: mol_type = other RNA

SEQ ID NO: 17167 - RNA, 127 nt, synthetic construct; identical to SEQ ID NO: 16411
  source 1..127: mol_type = other RNA

SEQ ID NO: 17168 - RNA, 126 nt, synthetic construct; identical to SEQ ID NO: 16412
  source 1..126: mol_type = other RNA

SEQ ID NO: 17169 - RNA, 125 nt, synthetic construct; identical to SEQ ID NO: 16413
  source 1..125: mol_type = other RNA

SEQ ID NO: 17170 - RNA, 124 nt, synthetic construct; identical to SEQ ID NO: 16414
  source 1..124: mol_type = other RNA

SEQ ID NO: 17171 - RNA, 131 nt, synthetic construct; identical to SEQ ID NO: 16415
  source 1..131: mol_type = other RNA

SEQ ID NO: 17172 - RNA, 130 nt, synthetic construct; identical to SEQ ID NO: 16416
  source 1..130: mol_type = other RNA

SEQ ID NO: 17173 - RNA, 129 nt, synthetic construct; identical to SEQ ID NO: 16417
  source 1..129: mol_type = other RNA

SEQ ID NO: 17174 - RNA, 128 nt, synthetic construct; identical to SEQ ID NO: 16418
  source 1..128: mol_type = other RNA

SEQ ID NO: 17175 - RNA, 127 nt, synthetic construct; identical to SEQ ID NO: 16419
  source 1..127: mol_type = other RNA

SEQ ID NO: 17176 - RNA, 126 nt, synthetic construct; identical to SEQ ID NO: 16420
  source 1..126: mol_type = other RNA

SEQ ID NO: 17177 - RNA, 119 nt, synthetic construct; identical to SEQ ID NO: 16421
  source 1..119: mol_type = other RNA

SEQ ID NO: 17178 - RNA, 118 nt, synthetic construct; identical to SEQ ID NO: 16422
  source 1..118: mol_type = other RNA

SEQ ID NO: 17179 - RNA, 117 nt, synthetic construct; identical to SEQ ID NO: 16423
  source 1..117: mol_type = other RNA

SEQ ID NO: 17180 - RNA, 116 nt, synthetic construct; identical to SEQ ID NO: 16424
  source 1..116: mol_type = other RNA

SEQ ID NO: 17181 - RNA, 115 nt, synthetic construct; identical to SEQ ID NO: 16425
  source 1..115: mol_type = other RNA

SEQ ID NO: 17182 - RNA, 114 nt, synthetic construct; identical to SEQ ID NO: 16426
  source 1..114: mol_type = other RNA

SEQ ID NO: 17183 - RNA, 121 nt, synthetic construct; identical to SEQ ID NO: 16427
  source 1..121: mol_type = other RNA

SEQ ID NO: 17184 - RNA, 120 nt, synthetic construct; identical to SEQ ID NO: 16428
  source 1..120: mol_type = other RNA

SEQ ID NO: 17185 - RNA, 119 nt, synthetic construct; identical to SEQ ID NO: 16429
  source 1..119: mol_type = other RNA

SEQ ID NO: 17186 - RNA, 118 nt, synthetic construct; identical to SEQ ID NO: 16430
  source 1..118: mol_type = other RNA

SEQ ID NO: 17187 - RNA, 117 nt, synthetic construct; identical to SEQ ID NO: 16431
  source 1..117: mol_type = other RNA

SEQ ID NO: 17188 - RNA, 116 nt, synthetic construct; identical to SEQ ID NO: 16432
  source 1..116: mol_type = other RNA

SEQ ID NO: 17189 - RNA, 123 nt, synthetic construct; identical to SEQ ID NO: 16433
  source 1..123: mol_type = other RNA

SEQ ID NO: 17190 - RNA, 122 nt, synthetic construct; identical to SEQ ID NO: 16434
  source 1..122: mol_type = other RNA

SEQ ID NO: 17191 - RNA, 121 nt, synthetic construct; identical to SEQ ID NO: 16435
  source 1..121: mol_type = other RNA

SEQ ID NO: 17192 - RNA, 120 nt, synthetic construct; identical to SEQ ID NO: 16436
  source 1..120: mol_type = other RNA

SEQ ID NO: 17193 - RNA, 119 nt, synthetic construct; identical to SEQ ID NO: 16437
  source 1..119: mol_type = other RNA

SEQ ID NO: 17194 - RNA, 118 nt, synthetic construct; identical to SEQ ID NO: 16438
  source 1..118: mol_type = other RNA

SEQ ID NO: 17195 - RNA, 125 nt, synthetic construct; identical to SEQ ID NO: 16439
  source 1..125: mol_type = other RNA

SEQ ID NO: 17196 - RNA, 124 nt, synthetic construct; identical to SEQ ID NO: 16440
  source 1..124: mol_type = other RNA

SEQ ID NO: 17197 - RNA, 123 nt, synthetic construct; identical to SEQ ID NO: 16441
  source 1..123: mol_type = other RNA

SEQ ID NO: 17198 - RNA, 122 nt, synthetic construct; identical to SEQ ID NO: 16442
  source 1..122: mol_type = other RNA

SEQ ID NO: 17199 - RNA, 121 nt, synthetic construct; identical to SEQ ID NO: 16443
  source 1..121: mol_type = other RNA

SEQ ID NO: 17200 - RNA, 120 nt, synthetic construct; identical to SEQ ID NO: 16444
  source 1..120: mol_type = other RNA

SEQ ID NO: 17201 - RNA, 127 nt, synthetic construct; identical to SEQ ID NO: 16445
  source 1..127: mol_type = other RNA

SEQ ID NO: 17202 - RNA, 126 nt, synthetic construct; identical to SEQ ID NO: 16446
  source 1..126: mol_type = other RNA

SEQ ID NO: 17203 - RNA, 125 nt, synthetic construct; identical to SEQ ID NO: 16447
  source 1..125: mol_type = other RNA

SEQ ID NO: 17204 - RNA, 124 nt, synthetic construct; identical to SEQ ID NO: 16448
  source 1..124: mol_type = other RNA

SEQ ID NO: 17205 - RNA, 123 nt, synthetic construct; identical to SEQ ID NO: 16449
  source 1..123: mol_type = other RNA

SEQ ID NO: 17206 - RNA, 122 nt, synthetic construct; identical to SEQ ID NO: 16450
  source 1..122: mol_type = other RNA

SEQ ID NO: 17207 - RNA, 129 nt, synthetic construct; identical to SEQ ID NO: 16451
  source 1..129: mol_type = other RNA

SEQ ID NO: 17208 - RNA, 128 nt, synthetic construct; identical to SEQ ID NO: 16452
  source 1..128: mol_type = other RNA

SEQ ID NO: 17209 - RNA, 127 nt, synthetic construct; identical to SEQ ID NO: 16453
  source 1..127: mol_type = other RNA

SEQ ID NO: 17210 - RNA, 126 nt, synthetic construct; identical to SEQ ID NO: 16454
  source 1..126: mol_type = other RNA

SEQ ID NO: 17211 - RNA, 125 nt, synthetic construct; identical to SEQ ID NO: 16455
  source 1..125: mol_type = other RNA

SEQ ID NO: 17212 - RNA, 124 nt, synthetic construct; identical to SEQ ID NO: 16456
  source 1..124: mol_type = other RNA

SEQ ID NO: 17213 - RNA, 131 nt, synthetic construct; identical to SEQ ID NO: 16457
  source 1..131: mol_type = other RNA

SEQ ID NO: 17214 - RNA, 130 nt, synthetic construct; identical to SEQ ID NO: 16458
  source 1..130: mol_type = other RNA

SEQ ID NO: 17215 - RNA, 129 nt, synthetic construct; identical to SEQ ID NO: 16459
  source 1..129: mol_type = other RNA

SEQ ID NO: 17216 - RNA, 128 nt, synthetic construct; identical to SEQ ID NO: 16460
  source 1..128: mol_type = other RNA

SEQ ID NO: 17217 - RNA, 127 nt, synthetic construct; identical to SEQ ID NO: 16461
  source 1..127: mol_type = other RNA

SEQ ID NO: 17218 - RNA, 126 nt, synthetic construct; identical to SEQ ID NO: 16462
  source 1..126: mol_type = other RNA

SEQ ID NO: 17219 - RNA, 121 nt, synthetic construct; identical to SEQ ID NO: 16463
  source 1..121: mol_type = other RNA

SEQ ID NO: 17220 - RNA, 120 nt, synthetic construct; identical to SEQ ID NO: 16464
  source 1..120: mol_type = other RNA

SEQ ID NO: 17221 - RNA, 119 nt, synthetic construct; identical to SEQ ID NO: 16465
  source 1..119: mol_type = other RNA

SEQ ID NO: 17222 - RNA, 118 nt, synthetic construct; identical to SEQ ID NO: 16466
  source 1..118: mol_type = other RNA

SEQ ID NO: 17223 - RNA, 117 nt, synthetic construct; identical to SEQ ID NO: 16467
  source 1..117: mol_type = other RNA

SEQ ID NO: 17224 - RNA, 116 nt, synthetic construct; identical to SEQ ID NO: 16468
  source 1..116: mol_type = other RNA

SEQ ID NO: 17225 - RNA, 123 nt, synthetic construct; identical to SEQ ID NO: 16469
  source 1..123: mol_type = other RNA

SEQ ID NO: 17226 - RNA, 122 nt, synthetic construct; identical to SEQ ID NO: 16470
  source 1..122: mol_type = other RNA

SEQ ID NO: 17227 - RNA, 121 nt, synthetic construct; identical to SEQ ID NO: 16471
  source 1..121: mol_type = other RNA

SEQ ID NO: 17228 - RNA, 120 nt, synthetic construct; identical to SEQ ID NO: 16472
  source 1..120: mol_type = other RNA

SEQ ID NO: 17229 - RNA, 119 nt, synthetic construct; identical to SEQ ID NO: 16473
  source 1..119: mol_type = other RNA

SEQ ID NO: 17230 - RNA, 118 nt, synthetic construct; identical to SEQ ID NO: 16474
  source 1..118: mol_type = other RNA

SEQ ID NO: 17231 - RNA, 125 nt, synthetic construct; identical to SEQ ID NO: 16475
  source 1..125: mol_type = other RNA

SEQ ID NO: 17232 - RNA, 124 nt, synthetic construct; identical to SEQ ID NO: 16476
  source 1..124: mol_type = other RNA

SEQ ID NO: 17233 - RNA, 123 nt, synthetic construct; identical to SEQ ID NO: 16477
  source 1..123: mol_type = other RNA

SEQ ID NO: 17234 - RNA, 122 nt, synthetic construct; identical to SEQ ID NO: 16478
  source 1..122: mol_type = other RNA

SEQ ID NO: 17235 - RNA, 121 nt, synthetic construct; identical to SEQ ID NO: 16479
  source 1..121: mol_type = other RNA

SEQ ID NO: 17236 - RNA, 120 nt, synthetic construct; identical to SEQ ID NO: 16480
  source 1..120: mol_type = other RNA

SEQ ID NO: 17237 - RNA, 127 nt, synthetic construct; identical to SEQ ID NO: 16481
  source 1..127: mol_type = other RNA

SEQ ID NO: 17238 - RNA, 126 nt, synthetic construct; identical to SEQ ID NO: 16482
  source 1..126: mol_type = other RNA

SEQ ID NO: 17239 - RNA, 125 nt, synthetic construct; identical to SEQ ID NO: 16483
  source 1..125: mol_type = other RNA

SEQ ID NO: 17240 - RNA, 124 nt, synthetic construct; identical to SEQ ID NO: 16484
  source 1..124: mol_type = other RNA

SEQ ID NO: 17241 - RNA, 123 nt, synthetic construct; identical to SEQ ID NO: 16485
  source 1..123: mol_type = other RNA

SEQ ID NO: 17242 - RNA, 122 nt, synthetic construct; identical to SEQ ID NO: 16486
  source 1..122: mol_type = other RNA

SEQ ID NO: 17243 - RNA, 129 nt, synthetic construct; identical to SEQ ID NO: 16487
  source 1..129: mol_type = other RNA

SEQ ID NO: 17244 - RNA, 128 nt, synthetic construct; identical to SEQ ID NO: 16488
  source 1..128: mol_type = other RNA

SEQ ID NO: 17245 - RNA, 127 nt, synthetic construct; identical to SEQ ID NO: 16489
  source 1..127: mol_type = other RNA

SEQ ID NO: 17246 - RNA, 126 nt, synthetic construct; identical to SEQ ID NO: 16490
  source 1..126: mol_type = other RNA

SEQ ID NO: 17247 - RNA, 125 nt, synthetic construct; identical to SEQ ID NO: 16491
  source 1..125: mol_type = other RNA

SEQ ID NO: 17248 - RNA, 124 nt, synthetic construct; identical to SEQ ID NO: 16492
  source 1..124: mol_type = other RNA

SEQ ID NO: 17249 - RNA, 131 nt, synthetic construct; identical to SEQ ID NO: 16493
  source 1..131: mol_type = other RNA

SEQ ID NO: 17250 - RNA, 130 nt, synthetic construct; identical to SEQ ID NO: 16494
  source 1..130: mol_type = other RNA

SEQ ID NO: 17251 - RNA, 129 nt, synthetic construct; identical to SEQ ID NO: 16495
  source 1..129: mol_type = other RNA

SEQ ID NO: 17252 - RNA, 128 nt, synthetic construct; identical to SEQ ID NO: 16496
  source 1..128: mol_type = other RNA

SEQ ID NO: 17253 - RNA, 127 nt, synthetic construct; identical to SEQ ID NO: 16497
  source 1..127: mol_type = other RNA

SEQ ID NO: 17254 - RNA, 126 nt, synthetic construct; identical to SEQ ID NO: 16498
  source 1..126: mol_type = other RNA

SEQ ID NO: 17255 - RNA, 133 nt, synthetic construct; identical to SEQ ID NO: 16499
  source 1..133: mol_type = other RNA

SEQ ID NO: 17256 - RNA, 132 nt, synthetic construct; identical to SEQ ID NO: 16500
  source 1..132: mol_type = other RNA

SEQ ID NO: 17257 - RNA, 131 nt, synthetic construct; identical to SEQ ID NO: 16501
  source 1..131: mol_type = other RNA

SEQ ID NO: 17258 - RNA, 130 nt, synthetic construct; identical to SEQ ID NO: 16502
  source 1..130: mol_type = other RNA

SEQ ID NO: 17259 - RNA, 129 nt, synthetic construct; identical to SEQ ID NO: 16503
  source 1..129: mol_type = other RNA

SEQ ID NO: 17260 - RNA, 128 nt, synthetic construct; identical to SEQ ID NO: 16504
  source 1..128: mol_type = other RNA

SEQ ID NO: 17261 - RNA, 114 nt, synthetic construct; identical to SEQ ID NO: 16505
  source 1..114: mol_type = other RNA

SEQ ID NO: 17262 - RNA, 113 nt, synthetic construct; identical to SEQ ID NO: 16506
  source 1..113: mol_type = other RNA

SEQ ID NO: 17263 - RNA, 112 nt, synthetic construct; identical to SEQ ID NO: 16507
  source 1..112: mol_type = other RNA

SEQ ID NO: 17264 - RNA, 111 nt, synthetic construct; identical to SEQ ID NO: 16508
  source 1..111: mol_type = other RNA

SEQ ID NO: 17265 - RNA, 110 nt, synthetic construct; identical to SEQ ID NO: 16509
  source 1..110: mol_type = other RNA

SEQ ID NO: 17266 - RNA, 109 nt, synthetic construct; identical to SEQ ID NO: 16510
  source 1..109: mol_type = other RNA

SEQ ID NO: 17267 - RNA, 116 nt, synthetic construct; identical to SEQ ID NO: 16511
  source 1..116: mol_type = other RNA

SEQ ID NO: 17268 - RNA, 115 nt, synthetic construct; identical to SEQ ID NO: 16512
  source 1..115: mol_type = other RNA

SEQ ID NO: 17269 - RNA, 114 nt, synthetic construct; identical to SEQ ID NO: 16513
  source 1..114: mol_type = other RNA

SEQ ID NO: 17270 - RNA, 113 nt, synthetic construct; identical to SEQ ID NO: 16514
  source 1..113: mol_type = other RNA

SEQ ID NO: 17271 - RNA, 112 nt, synthetic construct; identical to SEQ ID NO: 16515
  source 1..112: mol_type = other RNA

SEQ ID NO: 17272 - RNA, 111 nt, synthetic construct; identical to SEQ ID NO: 16516
  source 1..111: mol_type = other RNA

SEQ ID NO: 17273 - RNA, 118 nt, synthetic construct; identical to SEQ ID NO: 16517
  source 1..118: mol_type = other RNA

SEQ ID NO: 17274 - RNA, 117 nt, synthetic construct; identical to SEQ ID NO: 16518
  source 1..117: mol_type = other RNA

SEQ ID NO: 17275 - RNA, 116 nt, synthetic construct; identical to SEQ ID NO: 16519
  source 1..116: mol_type = other RNA

SEQ ID NO: 17276 - RNA, 115 nt, synthetic construct; identical to SEQ ID NO: 16520
  source 1..115: mol_type = other RNA

SEQ ID NO: 17277 - RNA, 114 nt, synthetic construct; identical to SEQ ID NO: 16521
  source 1..114: mol_type = other RNA

SEQ ID NO: 17278 - RNA, 113 nt, synthetic construct; identical to SEQ ID NO: 16522
  source 1..113: mol_type = other RNA

SEQ ID NO: 17279 - RNA, 120 nt, synthetic construct; identical to SEQ ID NO: 16523
  source 1..120: mol_type = other RNA

SEQ ID NO: 17280 - RNA, 119 nt, synthetic construct; identical to SEQ ID NO: 16524
  source 1..119: mol_type = other RNA

SEQ ID NO: 17281 - RNA, 118 nt, synthetic construct; identical to SEQ ID NO: 16525
  source 1..118: mol_type = other RNA

SEQ ID NO: 17282 - RNA, 117 nt, synthetic construct; identical to SEQ ID NO: 16526
  source 1..117: mol_type = other RNA

SEQ ID NO: 17283 - RNA, 116 nt, synthetic construct; identical to SEQ ID NO: 16527
  source 1..116: mol_type = other RNA

SEQ ID NO: 17284 - RNA, 115 nt, synthetic construct; identical to SEQ ID NO: 16528
  source 1..115: mol_type = other RNA

SEQ ID NO: 17285 - RNA, 122 nt, synthetic construct; identical to SEQ ID NO: 16529
  source 1..122: mol_type = other RNA

SEQ ID NO: 17286 - RNA, 121 nt, synthetic construct; identical to SEQ ID NO: 16530
  source 1..121: mol_type = other RNA

SEQ ID NO: 17287 - RNA, 120 nt, synthetic construct; identical to SEQ ID NO: 16531
  source 1..120: mol_type = other RNA

SEQ ID NO: 17288 - RNA, 119 nt, synthetic construct; identical to SEQ ID NO: 16532
  source 1..119: mol_type = other RNA

SEQ ID NO: 17289 - RNA, 118 nt, synthetic construct; identical to SEQ ID NO: 16533
  source 1..118: mol_type = other RNA

SEQ ID NO: 17290 - RNA, 117 nt, synthetic construct; identical to SEQ ID NO: 16534
  source 1..117: mol_type = other RNA

SEQ ID NO: 17291 - RNA, 124 nt, synthetic construct; identical to SEQ ID NO: 16535
  source 1..124: mol_type = other RNA

SEQ ID NO: 17292 - RNA, 123 nt, synthetic construct; identical to SEQ ID NO: 16536
  source 1..123: mol_type = other RNA

SEQ ID NO: 17293 - RNA, 122 nt, synthetic construct; identical to SEQ ID NO: 16537
  source 1..122: mol_type = other RNA

SEQ ID NO: 17294 - RNA, 121 nt, synthetic construct; identical to SEQ ID NO: 16538
  source 1..121: mol_type = other RNA

SEQ ID NO: 17295 - RNA, 120 nt, synthetic construct; identical to SEQ ID NO: 16539
  source 1..120: mol_type = other RNA

SEQ ID NO: 17296 - RNA, 119 nt, synthetic construct; identical to SEQ ID NO: 16540
  source 1..119: mol_type = other RNA

SEQ ID NO: 17297 - RNA, 126 nt, synthetic construct; identical to SEQ ID NO: 16541
  source 1..126: mol_type = other RNA

SEQ ID NO: 17298 - RNA, 125 nt, synthetic construct; identical to SEQ ID NO: 16542
  source 1..125: mol_type = other RNA

SEQ ID NO: 17299 - RNA, 124 nt, synthetic construct; identical to SEQ ID NO: 16543
  source 1..124: mol_type = other RNA

SEQ ID NO: 17300 - RNA, 123 nt, synthetic construct; identical to SEQ ID NO: 16544
  source 1..123: mol_type = other RNA

SEQ ID NO: 17301 - RNA, 122 nt, synthetic construct; identical to SEQ ID NO: 16545
  source 1..122: mol_type = other RNA

SEQ ID NO: 17302 - RNA, 121 nt, synthetic construct; identical to SEQ ID NO: 16546
  source 1..121: mol_type = other RNA

SEQ ID NO: 17303 - RNA, 114 nt, synthetic construct; identical to SEQ ID NO: 16547
  source 1..114: mol_type = other RNA

SEQ ID NO: 17304 - RNA, 113 nt, synthetic construct; identical to SEQ ID NO: 16548
  source 1..113: mol_type = other RNA

SEQ ID NO: 17305 - RNA, 112 nt, synthetic construct; identical to SEQ ID NO: 16549
  source 1..112: mol_type = other RNA

SEQ ID NO: 17306 - RNA, 111 nt, synthetic construct; identical to SEQ ID NO: 16550
  source 1..111: mol_type = other RNA

SEQ ID NO: 17307 - RNA, 110 nt, synthetic construct; identical to SEQ ID NO: 16551
  source 1..110: mol_type = other RNA

SEQ ID NO: 17308 - RNA, 109 nt, synthetic construct; identical to SEQ ID NO: 16552
  source 1..109: mol_type = other RNA

SEQ ID NO: 17309 - RNA, 116 nt, synthetic construct; identical to SEQ ID NO: 16553
  source 1..116: mol_type = other RNA

SEQ ID NO: 17310 - RNA, 115 nt, synthetic construct; identical to SEQ ID NO: 16554
  source 1..115: mol_type = other RNA

SEQ ID NO: 17311 - RNA, 114 nt, synthetic construct; identical to SEQ ID NO: 16555
  source 1..114: mol_type = other RNA

SEQ ID NO: 17312 - RNA, 113 nt, synthetic construct; identical to SEQ ID NO: 16556
  source 1..113: mol_type = other RNA

SEQ ID NO: 17313 - RNA, 112 nt, synthetic construct; identical to SEQ ID NO: 16557
  source 1..112: mol_type = other RNA

SEQ ID NO: 17314 - RNA, 111 nt, synthetic construct; identical to SEQ ID NO: 16558
  source 1..111: mol_type = other RNA

SEQ ID NO: 17315 - RNA, 118 nt, synthetic construct; identical to SEQ ID NO: 16559
  source 1..118: mol_type = other RNA

SEQ ID NO: 17316 - RNA, 117 nt, synthetic construct; identical to SEQ ID NO: 16560
  source 1..117: mol_type = other RNA

SEQ ID NO: 17317 - RNA, 116 nt, synthetic construct; identical to SEQ ID NO: 16561
  source 1..116: mol_type = other RNA

SEQ ID NO: 17318 - RNA, 115 nt, synthetic construct; identical to SEQ ID NO: 16562
  source 1..115: mol_type = other RNA

SEQ ID NO: 17319 - RNA, 114 nt, synthetic construct; identical to SEQ ID NO: 16563
  source 1..114: mol_type = other RNA

SEQ ID NO: 17320 - RNA, 113 nt, synthetic construct; identical to SEQ ID NO: 16564
  source 1..113: mol_type = other RNA

SEQ ID NO: 17321 - RNA, 120 nt, synthetic construct; identical to SEQ ID NO: 16565
  source 1..120: mol_type = other RNA

SEQ ID NO: 17322 - RNA, 119 nt, synthetic construct; identical to SEQ ID NO: 16566
  source 1..119: mol_type = other RNA

SEQ ID NO: 17323 - RNA, 118 nt, synthetic construct; identical to SEQ ID NO: 16567
  source 1..118: mol_type = other RNA

SEQ ID NO: 17324 - RNA, 117 nt, synthetic construct; identical to SEQ ID NO: 16568
  source 1..117: mol_type = other RNA

SEQ ID NO: 17325 - RNA, 116 nt, synthetic construct; identical to SEQ ID NO: 16569
  source 1..116: mol_type = other RNA

SEQ ID NO: 17326 - RNA, 115 nt, synthetic construct; identical to SEQ ID NO: 16570
  source 1..115: mol_type = other RNA

SEQ ID NO: 17327 - RNA, 122 nt, synthetic construct; identical to SEQ ID NO: 16571
  source 1..122: mol_type = other RNA

SEQ ID NO: 17328 - RNA, 121 nt, synthetic construct; identical to SEQ ID NO: 16572
  source 1..121: mol_type = other RNA

SEQ ID NO: 17329 - RNA, 120 nt, synthetic construct; identical to SEQ ID NO: 16573
  source 1..120: mol_type = other RNA

SEQ ID NO: 17330 - RNA, 119 nt, synthetic construct; identical to SEQ ID NO: 16574
  source 1..119: mol_type = other RNA

SEQ ID NO: 17331 - RNA, 118 nt, synthetic construct; identical to SEQ ID NO: 16575
  source 1..118: mol_type = other RNA

SEQ ID NO: 17332 - RNA, 117 nt, synthetic construct; identical to SEQ ID NO: 16576
  source 1..117: mol_type = other RNA

SEQ ID NO: 17333 - RNA, 124 nt, synthetic construct; identical to SEQ ID NO: 16577
  source 1..124: mol_type = other RNA

SEQ ID NO: 17334 - RNA, 123 nt, synthetic construct; identical to SEQ ID NO: 16578
  source 1..123: mol_type = other RNA

SEQ ID NO: 17335 - RNA, 122 nt, synthetic construct; identical to SEQ ID NO: 16579
  source 1..122: mol_type = other RNA

SEQ ID NO: 17336 - RNA, 121 nt, synthetic construct; identical to SEQ ID NO: 16580
  source 1..121: mol_type = other RNA

SEQ ID NO: 17337 - RNA, 120 nt, synthetic construct; identical to SEQ ID NO: 16581
  source 1..120: mol_type = other RNA

SEQ ID NO: 17338 - RNA, 119 nt, synthetic construct; identical to SEQ ID NO: 16582
  source 1..119: mol_type = other RNA

SEQ ID NO: 17339 - RNA, 126 nt, synthetic construct; identical to SEQ ID NO: 16583
  source 1..126: mol_type = other RNA

SEQ ID NO: 17340 - RNA, 125 nt, synthetic construct; identical to SEQ ID NO: 16584
  source 1..125: mol_type = other RNA

SEQ ID NO: 17341 - RNA, 124 nt, synthetic construct; identical to SEQ ID NO: 16585
  source 1..124: mol_type = other RNA

SEQ ID NO: 17342 - RNA, 123 nt, synthetic construct; identical to SEQ ID NO: 16586
  source 1..123: mol_type = other RNA

SEQ ID NO: 17343 - RNA, 122 nt, synthetic construct; identical to SEQ ID NO: 16587
  source 1..122: mol_type = other RNA

SEQ ID NO: 17344 - RNA, 121 nt, synthetic construct; identical to SEQ ID NO: 16588
  source 1..121: mol_type = other RNA

SEQ ID NO: 17345 - RNA, 122 nt, synthetic construct; identical to SEQ ID NO: 16589
  source 1..122: mol_type = other RNA

SEQ ID NO: 17346 - RNA, 121 nt, synthetic construct; identical to SEQ ID NO: 16590
  source 1..121: mol_type = other RNA

SEQ ID NO: 17347 - RNA, 120 nt, synthetic construct; identical to SEQ ID NO: 16591
  source 1..120: mol_type = other RNA

SEQ ID NO: 17348 - RNA, 119 nt, synthetic construct; identical to SEQ ID NO: 16592
  source 1..119: mol_type = other RNA

SEQ ID NO: 17349 - RNA, 118 nt, synthetic construct; identical to SEQ ID NO: 16593
  source 1..118: mol_type = other RNA

SEQ ID NO: 17350 - RNA, 117 nt, synthetic construct; identical to SEQ ID NO: 16594
  source 1..117: mol_type = other RNA

SEQ ID NO: 17351 - RNA, 124 nt, synthetic construct; identical to SEQ ID NO: 16595
  source 1..124: mol_type = other RNA

SEQ ID NO: 17352 - RNA, 123 nt, synthetic construct; identical to SEQ ID NO: 16596
  source 1..123: mol_type = other RNA

SEQ ID NO: 17353 - RNA, 122 nt, synthetic construct; identical to SEQ ID NO: 16597
  source 1..122: mol_type = other RNA

SEQ ID NO: 17354 - RNA, 121 nt, synthetic construct; identical to SEQ ID NO: 16598
  source 1..121: mol_type = other RNA

SEQ ID NO: 17355 - RNA, 120 nt, synthetic construct; identical to SEQ ID NO: 16599
  source 1..120: mol_type = other RNA

SEQ ID NO: 17356 - RNA, 119 nt, synthetic construct; identical to SEQ ID NO: 16600
  source 1..119: mol_type = other RNA

SEQ ID NO: 17357 - RNA, 126 nt, synthetic construct; identical to SEQ ID NO: 16601
  source 1..126: mol_type = other RNA

SEQ ID NO: 17358 - RNA, 125 nt, synthetic construct; identical to SEQ ID NO: 16602
  source 1..125: mol_type = other RNA

SEQ ID NO: 17359 - RNA, 124 nt, synthetic construct; identical to SEQ ID NO: 16603
  source 1..124: mol_type = other RNA

SEQ ID NO: 17360 - RNA, 123 nt, synthetic construct; identical to SEQ ID NO: 16604
  source 1..123: mol_type = other RNA

SEQ ID NO: 17361 - RNA, 122 nt, synthetic construct; identical to SEQ ID NO: 16605
  source 1..122: mol_type = other RNA

SEQ ID NO: 17362 - RNA, 121 nt, synthetic construct; identical to SEQ ID NO: 16606
  source 1..121: mol_type = other RNA

SEQ ID NO: 17363 - RNA, 128 nt, synthetic construct; identical to SEQ ID NO: 16607
  source 1..128: mol_type = other RNA

SEQ ID NO: 17364 - RNA, 127 nt, synthetic construct; identical to SEQ ID NO: 16608
  source 1..127: mol_type = other RNA

SEQ ID NO: 17365 - RNA, 126 nt, synthetic construct; identical to SEQ ID NO: 16609
  source 1..126: mol_type = other RNA

SEQ ID NO: 17366 - RNA, 125 nt, synthetic construct; identical to SEQ ID NO: 16610
  source 1..125: mol_type = other RNA

SEQ ID NO: 17367 - RNA, 124 nt, synthetic construct; identical to SEQ ID NO: 16611
  source 1..124: mol_type = other RNA

SEQ ID NO: 17368 - RNA, 123 nt, synthetic construct; identical to SEQ ID NO: 16612
  source 1..123: mol_type = other RNA

SEQ ID NO: 17369 - RNA, 130 nt, synthetic construct; identical to SEQ ID NO: 16613
  source 1..130: mol_type = other RNA

SEQ ID NO: 17370 - RNA, 129 nt, synthetic construct; identical to SEQ ID NO: 16614
  source 1..129: mol_type = other RNA

SEQ ID NO: 17371 - RNA, 128 nt, synthetic construct; identical to SEQ ID NO: 16615
  source 1..128: mol_type = other RNA

SEQ ID NO: 17372 - RNA, 127 nt, synthetic construct; identical to SEQ ID NO: 16616
  source 1..127: mol_type = other RNA

SEQ ID NO: 17373 - RNA, 126 nt, synthetic construct; identical to SEQ ID NO: 16617
  source 1..126: mol_type = other RNA

SEQ ID NO: 17374 - RNA, 125 nt, synthetic construct; identical to SEQ ID NO: 16618
  source 1..125: mol_type = other RNA

SEQ ID NO: 17375 - RNA, 132 nt, synthetic construct; identical to SEQ ID NO: 16619
  source 1..132: mol_type = other RNA

SEQ ID NO: 17376 - RNA, 131 nt, synthetic construct; identical to SEQ ID NO: 16620
  source 1..131: mol_type = other RNA

SEQ ID NO: 17377 - RNA, 130 nt, synthetic construct; identical to SEQ ID NO: 16621
  source 1..130: mol_type = other RNA

SEQ ID NO: 17378 - RNA, 129 nt, synthetic construct; identical to SEQ ID NO: 16622
  source 1..129: mol_type = other RNA

SEQ ID NO: 17379 - RNA, 128 nt, synthetic construct; identical to SEQ ID NO: 16623
  source 1..128: mol_type = other RNA

SEQ ID NO: 17380 - RNA, 127 nt, synthetic construct; identical to SEQ ID NO: 16624
  source 1..127: mol_type = other RNA

SEQ ID NO: 17381 - RNA, 134 nt, synthetic construct; identical to SEQ ID NO: 16625
  source 1..134: mol_type = other RNA

SEQ ID NO: 17382 - RNA, 133 nt, synthetic construct; identical to SEQ ID NO: 16626
  source 1..133: mol_type = other RNA

SEQ ID NO: 17383 - RNA, 132 nt, synthetic construct; identical to SEQ ID NO: 16627
  source 1..132: mol_type = other RNA

SEQ ID NO: 17384 - RNA, 131 nt, synthetic construct; identical to SEQ ID NO: 16628
  source 1..131: mol_type = other RNA

SEQ ID NO: 17385 - RNA, 130 nt, synthetic construct; identical to SEQ ID NO: 16629
  source 1..130: mol_type = other RNA

SEQ ID NO: 17386 - RNA, 129 nt, synthetic construct; identical to SEQ ID NO: 16630
  source 1..129: mol_type = other RNA

SEQ ID NO: 17387 - RNA, 124 nt, synthetic construct; identical to SEQ ID NO: 16631
  source 1..124: mol_type = other RNA

SEQ ID NO: 17388 - RNA, 123 nt, synthetic construct; identical to SEQ ID NO: 16632
  source 1..123: mol_type = other RNA

SEQ ID NO: 17389 - RNA, 122 nt, synthetic construct; identical to SEQ ID NO: 16633
  source 1..122: mol_type = other RNA

SEQ ID NO: 17390 - RNA, 121 nt, synthetic construct; identical to SEQ ID NO: 16634
  source 1..121: mol_type = other RNA

SEQ ID NO: 17391 - RNA, 120 nt, synthetic construct; identical to SEQ ID NO: 16635
  source 1..120: mol_type = other RNA

SEQ ID NO: 17392 - RNA, 119 nt, synthetic construct; identical to SEQ ID NO: 16636
  source 1..119: mol_type = other RNA

SEQ ID NO: 17393 - RNA, 126 nt, synthetic construct; identical to SEQ ID NO: 16637
  source 1..126: mol_type = other RNA

SEQ ID NO: 17394 - RNA, 125 nt, synthetic construct; identical to SEQ ID NO: 16638
  source 1..125: mol_type = other RNA

SEQ ID NO: 17395 - RNA, 124 nt, synthetic construct; identical to SEQ ID NO: 16639
  source 1..124: mol_type = other RNA

SEQ ID NO: 17396 - RNA, 123 nt, synthetic construct; identical to SEQ ID NO: 16640
  source 1..123: mol_type = other RNA

SEQ ID NO: 17397 - RNA, 122 nt, synthetic construct; identical to SEQ ID NO: 16641
  source 1..122: mol_type = other RNA

SEQ ID NO: 17398 - RNA, 121 nt, synthetic construct; identical to SEQ ID NO: 16642
  source 1..121: mol_type = other RNA

SEQ ID NO: 17399 - RNA, 128 nt, synthetic construct; identical to SEQ ID NO: 16643
  source 1..128: mol_type = other RNA

SEQ ID NO: 17400 - RNA, 127 nt, synthetic construct; identical to SEQ ID NO: 16644
  source 1..127: mol_type = other RNA

SEQ ID NO: 17401 - RNA, 126 nt, synthetic construct; identical to SEQ ID NO: 16645
  source 1..126: mol_type = other RNA

SEQ ID NO: 17402 - RNA, 125 nt, synthetic construct; identical to SEQ ID NO: 16646
  source 1..125: mol_type = other RNA

SEQ ID NO: 17403 - RNA, 124 nt, synthetic construct; identical to SEQ ID NO: 16647
  source 1..124: mol_type = other RNA

SEQ ID NO: 17404 - RNA, 123 nt, synthetic construct; identical to SEQ ID NO: 16648
  source 1..123: mol_type = other RNA

SEQ ID NO: 17405 - RNA, 130 nt, synthetic construct; identical to SEQ ID NO: 16649
  source 1..130: mol_type = other RNA

SEQ ID NO: 17406 - RNA, 129 nt, synthetic construct; identical to SEQ ID NO: 16650
  source 1..129: mol_type = other RNA

SEQ ID NO: 17407 - RNA, 128 nt, synthetic construct; identical to SEQ ID NO: 16651
  source 1..128: mol_type = other RNA

SEQ ID NO: 17408 - RNA, 127 nt, synthetic construct; identical to SEQ ID NO: 16652
  source 1..127: mol_type = other RNA

SEQ ID NO: 17409 - RNA, 126 nt, synthetic construct; identical to SEQ ID NO: 16653
  source 1..126: mol_type = other RNA

SEQ ID NO: 17410 - RNA, 125 nt, synthetic construct; identical to SEQ ID NO: 16654
  source 1..125: mol_type = other RNA

SEQ ID NO: 17411 - RNA, 132 nt, synthetic construct; identical to SEQ ID NO: 16655
  source 1..132: mol_type = other RNA

SEQ ID NO: 17412 - RNA, 131 nt, synthetic construct; identical to SEQ ID NO: 16656
  source 1..131: mol_type = other RNA

SEQ ID NO: 17413 - RNA, 130 nt, synthetic construct; identical to SEQ ID NO: 16657
  source 1..130: mol_type = other RNA

SEQ ID NO: 17414 - RNA, 129 nt, synthetic construct; identical to SEQ ID NO: 16658
  source 1..129: mol_type = other RNA

SEQ ID NO: 17415 - RNA, 128 nt, synthetic construct; identical to SEQ ID NO: 16659
  source 1..128: mol_type = other RNA

SEQ ID NO: 17416 - RNA, 127 nt, synthetic construct; identical to SEQ ID NO: 16660
  source 1..127: mol_type = other RNA

SEQ ID NO: 17417 - RNA, 134 nt, synthetic construct; identical to SEQ ID NO: 16661
  source 1..134: mol_type = other RNA

SEQ ID NO: 17418 - RNA, 133 nt, synthetic construct; identical to SEQ ID NO: 16662
  source 1..133: mol_type = other RNA

SEQ ID NO: 17419 - RNA, 132 nt, synthetic construct; identical to SEQ ID NO: 16663
  source 1..132: mol_type = other RNA

SEQ ID NO: 17420 - RNA, 131 nt, synthetic construct; identical to SEQ ID NO: 16664
  source 1..131: mol_type = other RNA

SEQ ID NO: 17421 - RNA, 130 nt, synthetic construct; identical to SEQ ID NO: 16665
  source 1..130: mol_type = other RNA

SEQ ID NO: 17422 - RNA, 129 nt, synthetic construct; identical to SEQ ID NO: 16666
  source 1..129: mol_type = other RNA

SEQ ID NO: 17423 - RNA, 136 nt, synthetic construct; identical to SEQ ID NO: 16667
  source 1..136: mol_type = other RNA

SEQ ID NO: 17424 - RNA, 135 nt, synthetic construct; identical to SEQ ID NO: 16668
  source 1..135: mol_type = other RNA

SEQ ID NO: 17425 - RNA, 134 nt, synthetic construct; identical to SEQ ID NO: 16669
  source 1..134: mol_type = other RNA

SEQ ID NO: 17426 - RNA, 133 nt, synthetic construct; identical to SEQ ID NO: 16670
  source 1..133: mol_type = other RNA

SEQ ID NO: 17427 - RNA, 132 nt, synthetic construct; identical to SEQ ID NO: 16671
  source 1..132: mol_type = other RNA

SEQ ID NO: 17428 - RNA, 131 nt, synthetic construct; identical to SEQ ID NO: 16672
  source 1..131: mol_type = other RNA

SEQ ID NO: 17429 - RNA, 117 nt, synthetic construct; identical to SEQ ID NO: 16673
  source 1..117: mol_type = other RNA

SEQ ID NO: 17430 - RNA, 116 nt, synthetic construct; identical to SEQ ID NO: 16674
  source 1..116: mol_type = other RNA

SEQ ID NO: 17431 - RNA, 115 nt, synthetic construct; identical to SEQ ID NO: 16675
  source 1..115: mol_type = other RNA

SEQ ID NO: 17432 - RNA, 114 nt, synthetic construct; identical to SEQ ID NO: 16676
  source 1..114: mol_type = other RNA

SEQ ID NO: 17433 - RNA, 113 nt, synthetic construct; identical to SEQ ID NO: 16677
  source 1..113: mol_type = other RNA

SEQ ID NO: 17434 - RNA, 112 nt, synthetic construct; identical to SEQ ID NO: 16678
  source 1..112: mol_type = other RNA

SEQ ID NO: 17435 - RNA, 119 nt, synthetic construct; identical to SEQ ID NO: 16679
  source 1..119: mol_type = other RNA

SEQ ID NO: 17436 - RNA, 118 nt, synthetic construct; identical to SEQ ID NO: 16680
  source 1..118: mol_type = other RNA

SEQ ID NO: 17437 - RNA, 117 nt, synthetic construct; identical to SEQ ID NO: 16681
  source 1..117: mol_type = other RNA

SEQ ID NO: 17438 - RNA, 116 nt, synthetic construct; identical to SEQ ID NO: 16682
  source 1..116: mol_type = other RNA

SEQ ID NO: 17439 - RNA, 115 nt, synthetic construct; identical to SEQ ID NO: 16683
  source 1..115: mol_type = other RNA

SEQ ID NO: 17440 - RNA, 114 nt, synthetic construct; identical to SEQ ID NO: 16684
  source 1..114: mol_type = other RNA

SEQ ID NO: 17441 - RNA, 121 nt, synthetic construct; identical to SEQ ID NO: 16685
  source 1..121: mol_type = other RNA

SEQ ID NO: 17442 - RNA, 120 nt, synthetic construct; identical to SEQ ID NO: 16686
  source 1..120: mol_type = other RNA

SEQ ID NO: 17443 - RNA, 119 nt, synthetic construct; identical to SEQ ID NO: 16687
  source 1..119: mol_type = other RNA

SEQ ID NO: 17444 - RNA, 118 nt, synthetic construct; identical to SEQ ID NO: 16688
  source 1..118: mol_type = other RNA

SEQ ID NO: 17445 - RNA, 117 nt, synthetic construct; identical to SEQ ID NO: 16689
  source 1..117: mol_type = other RNA

SEQ ID NO: 17446 - RNA, 116 nt, synthetic construct; identical to SEQ ID NO: 16690
  source 1..116: mol_type = other RNA

SEQ ID NO: 17447 - RNA, 123 nt, synthetic construct; identical to SEQ ID NO: 16691
  source 1..123: mol_type = other RNA

SEQ ID NO: 17448 - RNA, 122 nt, synthetic construct; identical to SEQ ID NO: 16692
  source 1..122: mol_type = other RNA

SEQ ID NO: 17449 - RNA, 121 nt, synthetic construct; identical to SEQ ID NO: 16693
  source 1..121: mol_type = other RNA

SEQ ID NO: 17450 - RNA, 120 nt, synthetic construct; identical to SEQ ID NO: 16694
  source 1..120: mol_type = other RNA

SEQ ID NO: 17451 - RNA, 119 nt, synthetic construct; identical to SEQ ID NO: 16695
  source 1..119: mol_type = other RNA

SEQ ID NO: 17452 - RNA, 118 nt, synthetic construct; identical to SEQ ID NO: 16696
  source 1..118: mol_type = other RNA

SEQ ID NO: 17453 - RNA, 125 nt, synthetic construct; identical to SEQ ID NO: 16697
  source 1..125: mol_type = other RNA

SEQ ID NO: 17454 - RNA, 124 nt, synthetic construct; identical to SEQ ID NO: 16698
  source 1..124: mol_type = other RNA

SEQ ID NO: 17455 - RNA, 123 nt, synthetic construct; identical to SEQ ID NO: 16699
  source 1..123: mol_type = other RNA

SEQ ID NO: 17456 - RNA, 122 nt, synthetic construct; identical to SEQ ID NO: 16700
  source 1..122: mol_type = other RNA

SEQ ID NO: 17457 - RNA, 121 nt, synthetic construct; identical to SEQ ID NO: 16701
  source 1..121: mol_type = other RNA

SEQ ID NO: 17458 - RNA, 120 nt, synthetic construct; identical to SEQ ID NO: 16702
  source 1..120: mol_type = other RNA

SEQ ID NO: 17459 - RNA, 127 nt, synthetic construct; identical to SEQ ID NO: 16703
  source 1..127: mol_type = other RNA

SEQ ID NO: 17460 - RNA, 126 nt, synthetic construct; identical to SEQ ID NO: 16704
  source 1..126: mol_type = other RNA

SEQ ID NO: 17461 - RNA, 125 nt, synthetic construct; identical to SEQ ID NO: 16705
  source 1..125: mol_type = other RNA

SEQ ID NO: 17462 - RNA, 124 nt, synthetic construct; identical to SEQ ID NO: 16706
  source 1..124: mol_type = other RNA

SEQ ID NO: 17463 - RNA, 123 nt, synthetic construct; identical to SEQ ID NO: 16707
  source 1..123: mol_type = other RNA

SEQ ID NO: 17464 - RNA, 122 nt, synthetic construct; identical to SEQ ID NO: 16708
  source 1..122: mol_type = other RNA

SEQ ID NO: 17465 - RNA, 129 nt, synthetic construct; identical to SEQ ID NO: 16709
  source 1..129: mol_type = other RNA

SEQ ID NO: 17466 - RNA, 128 nt, synthetic construct; identical to SEQ ID NO: 16710
  source 1..128: mol_type = other RNA

SEQ ID NO: 17467 - RNA, 127 nt, synthetic construct; identical to SEQ ID NO: 16711
  source 1..127: mol_type = other RNA

SEQ ID NO: 17468 - RNA, 126 nt, synthetic construct; identical to SEQ ID NO: 16712
  source 1..126: mol_type = other RNA

SEQ ID NO: 17469 - RNA, 125 nt, synthetic construct; identical to SEQ ID NO: 16713
  source 1..125: mol_type = other RNA

SEQ ID NO: 17470 - RNA, 124 nt, synthetic construct; identical to SEQ ID NO: 16714
  source 1..124: mol_type = other RNA

SEQ ID NO: 17471 - RNA, 117 nt, synthetic construct; identical to SEQ ID NO: 16715
  source 1..117: mol_type = other RNA

SEQ ID NO: 17472 - RNA, 116 nt, synthetic construct; identical to SEQ ID NO: 16716
  source 1..116: mol_type = other RNA

SEQ ID NO: 17473 - RNA, 115 nt, synthetic construct; identical to SEQ ID NO: 16717
  source 1..115: mol_type = other RNA

SEQ ID NO: 17474 - RNA, 114 nt, synthetic construct; identical to SEQ ID NO: 16718
  source 1..114: mol_type = other RNA

SEQ ID NO: 17475 - RNA, 113 nt, synthetic construct; identical to SEQ ID NO: 16719
  source 1..113: mol_type = other RNA

SEQ ID NO: 17476 - RNA, 112 nt, synthetic construct; identical to SEQ ID NO: 16720
  source 1..112: mol_type = other RNA

SEQ ID NO: 17477 - RNA, 119 nt, synthetic construct; identical to SEQ ID NO: 16721
  source 1..119: mol_type = other RNA

SEQ ID NO: 17478 - RNA, 118 nt, synthetic construct; identical to SEQ ID NO: 16722
  source 1..118: mol_type = other RNA

SEQ ID NO: 17479 - RNA, 117 nt, synthetic construct; identical to SEQ ID NO: 16723
  source 1..117: mol_type = other RNA

SEQ ID NO: 17480 - RNA, 116 nt, synthetic construct; identical to SEQ ID NO: 16724
  source 1..116: mol_type = other RNA

SEQ ID NO: 17481 - RNA, 115 nt, synthetic construct; identical to SEQ ID NO: 16725
  source 1..115: mol_type = other RNA

SEQ ID NO: 17482 - RNA, 114 nt, synthetic construct; identical to SEQ ID NO: 16726
  source 1..114: mol_type = other RNA

SEQ ID NO: 17483 - RNA, 121 nt, synthetic construct; identical to SEQ ID NO: 16727
  source 1..121: mol_type = other RNA

SEQ ID NO: 17484 - RNA, 120 nt, synthetic construct; identical to SEQ ID NO: 16728
  source 1..120: mol_type = other RNA

SEQ ID NO: 17485 - RNA, 119 nt, synthetic construct; identical to SEQ ID NO: 16729
  source 1..119: mol_type = other RNA

SEQ ID NO: 17486 - RNA, 118 nt, synthetic construct; identical to SEQ ID NO: 16730
  source 1..118: mol_type = other RNA

SEQ ID NO: 17487 - RNA, 117 nt, synthetic construct; identical to SEQ ID NO: 16731
  source 1..117: mol_type = other RNA

SEQ ID NO: 17488 - RNA, 116 nt, synthetic construct; identical to SEQ ID NO: 16732
  source 1..116: mol_type = other RNA

SEQ ID NO: 17489 - RNA, 123 nt, synthetic construct; identical to SEQ ID NO: 16733
  source 1..123: mol_type = other RNA

SEQ ID NO: 17490 - RNA, 122 nt, synthetic construct; identical to SEQ ID NO: 16734
  source 1..122: mol_type = other RNA

SEQ ID NO: 17491 - RNA, 121 nt, synthetic construct; identical to SEQ ID NO: 16735
  source 1..121: mol_type = other RNA

SEQ ID NO: 17492 - RNA, 120 nt, synthetic construct; identical to SEQ ID NO: 16736
  source 1..120: mol_type = other RNA

SEQ ID NO: 17493 - RNA, 119 nt, synthetic construct; identical to SEQ ID NO: 16737
  source 1..119: mol_type = other RNA

SEQ ID NO: 17494 - RNA, 118 nt, synthetic construct; identical to SEQ ID NO: 16738
  source 1..118: mol_type = other RNA

SEQ ID NO: 17495 - RNA, 125 nt, synthetic construct; identical to SEQ ID NO: 16739
  source 1..125: mol_type = other RNA

SEQ ID NO: 17496 - RNA, 124 nt, synthetic construct; identical to SEQ ID NO: 16740
  source 1..124: mol_type = other RNA

SEQ ID NO: 17497 - RNA, 123 nt, synthetic construct; identical to SEQ ID NO: 16741
  source 1..123: mol_type = other RNA

SEQ ID NO: 17498 - RNA, 122 nt, synthetic construct; identical to SEQ ID NO: 16742
  source 1..122: mol_type = other RNA

SEQ ID NO: 17499 - RNA, 121 nt, synthetic construct; identical to SEQ ID NO: 16743
  source 1..121: mol_type = other RNA

SEQ ID NO: 17500 - RNA, 120 nt, synthetic construct; identical to SEQ ID NO: 16744
  source 1..120: mol_type = other RNA

SEQ ID NO: 17501 - RNA, 127 nt, synthetic construct; identical to SEQ ID NO: 16745
  source 1..127: mol_type = other RNA

SEQ ID NO: 17502 - RNA, 126 nt, synthetic construct; identical to SEQ ID NO: 16746
  source 1..126: mol_type = other RNA

SEQ ID NO: 17503 - RNA, 125 nt, synthetic construct; identical to SEQ ID NO: 16747
  source 1..125: mol_type = other RNA

SEQ ID NO: 17504 - RNA, 124 nt, synthetic construct; identical to SEQ ID NO: 16748
  source 1..124: mol_type = other RNA

SEQ ID NO: 17505 - RNA, 123 nt, synthetic construct; identical to SEQ ID NO: 16749
  source 1..123: mol_type = other RNA

SEQ ID NO: 17506 - RNA, 122 nt, synthetic construct; identical to SEQ ID NO: 16750
  source 1..122: mol_type = other RNA

SEQ ID NO: 17507 - RNA, 129 nt, synthetic construct; identical to SEQ ID NO: 16751
  source 1..129: mol_type = other RNA

SEQ ID NO: 17508 - RNA, 128 nt, synthetic construct; identical to SEQ ID NO: 16752
  source 1..128: mol_type = other RNA

SEQ ID NO: 17509 - RNA, 127 nt, synthetic construct; identical to SEQ ID NO: 16753
  source 1..127: mol_type = other RNA

SEQ ID NO: 17510 - RNA, 126 nt, synthetic construct; identical to SEQ ID NO: 16754
  source 1..126: mol_type = other RNA

SEQ ID NO: 17511 - RNA, 125 nt, synthetic construct; identical to SEQ ID NO: 16755
  source 1..125: mol_type = other RNA

SEQ ID NO: 17512 - RNA, 124 nt, synthetic construct; identical to SEQ ID NO: 16756
  source 1..124: mol_type = other RNA

SEQ ID NO: 17513 - RNA, 20 nt, synthetic construct
  source 1..20: mol_type = other RNA
gagaatcaaaatcggtgaat

SEQ ID NO: 17514 - RNA, 20 nt, synthetic construct
  source 1..20: mol_type = other RNA
gctggtacacggcagggtca

SEQ ID NO: 17515 - RNA, 76 nt, synthetic construct
  source 1..76: mol_type = other RNA
gttttagagctagaaatagcaagttaaaataaggctagtccgttatcaacttgaaaaagtggcaccgagtcggtgc

SEQ ID NO: 17516 - RNA, 50 nt, synthetic construct
  source 1..50: mol_type = other RNA
atcatgtcctaaccctgatcctcttgtcccacagatatccagaaccctga

SEQ ID NO: 17517 - RNA, 47 nt, synthetic construct
  source 1..47: mol_type = other RNA
atcatgtcctaaccctgatcctcttgtcccacagatatccagaaccc

SEQ ID NO: 17518 - RNA, 50 nt, synthetic construct
  source 1..50: mol_type = other RNA
gtgtaccagctgagagactctaaatccagtgacaagtctgtctgcctatt

SEQ ID NO: 17519 - RNA, 47 nt, synthetic construct
  source 1..47: mol_type = other RNA
gtgtaccagctgagagactctaaatccagtgacaagtctgtctgcct

SEQ ID NO: 17520 - RNA, 16 nt, synthetic construct
  source 1..16: mol_type = other RNA
cctgccgtgtaccagc

SEQ ID NO: 17521 - RNA, 17 nt, synthetic construct
  source 1..17: mol_type = other RNA
caccgattttgattctc

SEQ ID NO: 17522 - protein, 2133 aa, synthetic construct; identical to SEQ ID NO: 1372

SEQ ID NO: 17523 - RNA, 120 nt, synthetic construct
  source 1..120: mol_type = other RNA
  modified_base 1: mod_base = OTHER; note = 2'-O-methyl modified nucleotide with phosphorothioate linkage
  modified_base 2: mod_base = OTHER; note = 2'-O-methyl modified nucleotide with phosphorothioate linkage
  modified_base 3: mod_base = OTHER; note = 2'-O-methyl modified nucleotide with phosphorothioate linkage
  modified_base 29: mod_base = OTHER; note = 2'-O-methyl modified nucleotide
  modified_base 30: mod_base = OTHER; note = 2'-O-methyl modified nucleotide
  modified_base 31: mod_base = OTHER; note = 2'-O-methyl modified nucleotide
  modified_base 32: mod_base = OTHER; note = 2'-O-methyl modified nucleotide
  modified_base 33: mod_base = OTHER; note = 2'-O-methyl modified nucleotide
  modified_base 34: mod_base = OTHER; note = 2'-O-methyl modified nucleotide
  modified_base 35: mod_base = OTHER; note = 2'-O-methyl modified nucleotide
  modified_base 36: mod_base = OTHER; note = 2'-O-methyl modified nucleotide
  modified_base 37: mod_base = OTHER; note = 2'-O-methyl modified nucleotide
  modified_base 38: mod_base = OTHER; note = 2'-O-methyl modified nucleotide
  modified_base 39: mod_base = OTHER; note = 2'-O-methyl modified nucleotide
  modified_base 40: mod_base = OTHER; note = 2'-O-methyl modified nucleotide
  modified_base 69: mod_base = OTHER; note = 2'-O-methyl modified nucleotide
  modified_base 70: mod_base = OTHER; note = 2'-O-methyl modified nucleotide
  modified_base 71: mod_base = OTHER; note = 2'-O-methyl modified nucleotide
  modified_base 72: mod_base = OTHER; note = 2'-O-methyl modified nucleotide
  modified_base 73: mod_base = OTHER; note = 2'-O-methyl modified nucleotide
  modified_base 74: mod_base = OTHER; note = 2'-O-methyl modified nucleotide
  modified_base 75: mod_base = OTHER; note = 2'-O-methyl modified nucleotide
  modified_base 76: mod_base = OTHER; note = 2'-O-methyl modified nucleotide
  modified_base 77: mod_base = OTHER; note = 2'-O-methyl modified nucleotide
  modified_base 78: mod_base = OTHER; note = 2'-O-methyl modified nucleotide
  modified_base 79: mod_base = OTHER; note = 2'-O-methyl modified nucleotide
  modified_base 80: mod_base = OTHER; note = 2'-O-methyl modified nucleotide
  modified_base 81: mod_base = OTHER; note = 2'-O-methyl modified nucleotide
  modified_base 82: mod_base = OTHER; note = 2'-O-methyl modified nucleotide
  modified_base 83: mod_base = OTHER; note = 2'-O-methyl modified nucleotide
  modified_base 84: mod_base = OTHER; note = 2'-O-methyl modified nucleotide
  modified_base 85: mod_base = OTHER; note = 2'-O-methyl modified nucleotide
  modified_base 86: mod_base = OTHER; note = 2'-O-methyl modified nucleotide
  modified_base 87: mod_base = OTHER; note = 2'-O-methyl modified nucleotide
  modified_base 88: mod_base = OTHER; note = 2'-O-methyl modified nucleotide
  modified_base 89: mod_base = OTHER; note = 2'-O-methyl modified nucleotide
  modified_base 90: mod_base = OTHER; note = 2'-O-methyl modified nucleotide
  modified_base 91: mod_base = OTHER; note = 2'-O-methyl modified nucleotide
  modified_base 92: mod_base = OTHER; note = 2'-O-methyl modified nucleotide
  modified_base 93: mod_base = OTHER; note = 2'-O-methyl modified nucleotide
  modified_base 94: mod_base = OTHER; note = 2'-O-methyl modified nucleotide
  modified_base 95: mod_base = OTHER; note = 2'-O-methyl modified nucleotide
  modified_base 96: mod_base = OTHER; note = 2'-O-methyl modified nucleotide
  modified_base 117: mod_base = OTHER; note = Nucleotide with phosphorothioate linkage
  modified_base 118: mod_base = OTHER; note = 2'-O-methyl modified nucleotide with phosphorothioate linkage
  modified_base 119: mod_base = OTHER; note = 2'-O-methyl modified nucleotide with phosphorothioate linkage
  modified_base 120: mod_base = OTHER; note = 2'-O-methyl modified nucleotide
actcacgctggatagcctccgttttagagctagaaatagcaagttaaaataaggctagtccgttatcaacttgaaaaagtggcaccgagtcggtgcgcctggatgatggctatccagcgt

SEQ ID NO: 17524 - RNA, 119 nt, synthetic construct
  source 1..119: mol_type = other RNA
  modified_base 1: mod_base = OTHER; note = 2'-O-methyl modified nucleotide with phosphorothioate linkage
  modified_base 2: mod_base = OTHER; note = 2'-O-methyl modified nucleotide with phosphorothioate linkage
  modified_base 3: mod_base = OTHER; note = 2'-O-methyl modified nucleotide with phosphorothioate linkage
  modified_base 29: mod_base = OTHER; note = 2'-O-methyl modified nucleotide
  modified_base 30: mod_base = OTHER; note = 2'-O-methyl modified nucleotide
  modified_base 31: mod_base = OTHER; note = 2'-O-methyl modified nucleotide
  modified_base 32: mod_base = OTHER; note = 2'-O-methyl modified nucleotide
  modified_base 33: mod_base = OTHER; note = 2'-O-methyl modified nucleotide
  modified_base 34: mod_base = OTHER; note = 2'-O-methyl modified nucleotide
  modified_base 35: mod_base = OTHER; note = 2'-O-methyl modified nucleotide
  modified_base 36: mod_base = OTHER; note = 2'-O-methyl modified nucleotide
  modified_base 37: mod_base = OTHER; note = 2'-O-methyl modified nucleotide
  modified_base 38: mod_base = OTHER; note = 2'-O-methyl modified nucleotide
  modified_base 39: mod_base = OTHER; note = 2'-O-methyl modified nucleotide
  modified_base 40: mod_base = OTHER; note = 2'-O-methyl modified nucleotide
  modified_base 69: mod_base = OTHER; note = 2'-O-methyl modified nucleotide
  modified_base 70: mod_base = OTHER; note = 2'-O-methyl modified nucleotide
  modified_base 71: mod_base = OTHER; note = 2'-O-methyl modified nucleotide
  modified_base 72: mod_base = OTHER; note = 2'-O-methyl modified nucleotide
  modified_base 73: mod_base = OTHER; note = 2'-O-methyl modified nucleotide
  modified_base 74: mod_base = OTHER; note = 2'-O-methyl modified nucleotide
  modified_base 75: mod_base = OTHER; note = 2'-O-methyl modified nucleotide
  modified_base 76: mod_base = OTHER; note = 2'-O-methyl modified nucleotide
  modified_base 77: mod_base = OTHER; note = 2'-O-methyl modified nucleotide
  modified_base 78: mod_base = OTHER; note = 2'-O-methyl modified nucleotide
  modified_base 79: mod_base = OTHER; note = 2'-O-methyl modified nucleotide
  modified_base 80: mod_base = OTHER; note = 2'-O-methyl modified nucleotide
  modified_base 81: mod_base = OTHER; note = 2'-O-methyl modified nucleotide
  modified_base 82: mod_base = OTHER; note = 2'-O-methyl modified nucleotide
  modified_base 83: mod_base = OTHER; note = 2'-O-methyl modified nucleotide
  modified_base 84: mod_base = OTHER; note = 2'-O-methyl modified nucleotide
  modified_base 85: mod_base = OTHER; note = 2'-O-methyl modified nucleotide
  modified_base 86: mod_base = OTHER; note = 2'-O-methyl modified nucleotide
  modified_base 87: mod_base = OTHER; note = 2'-O-methyl modified nucleotide
  modified_base 88: mod_base = OTHER; note = 2'-O-methyl modified nucleotide
  modified_base 89: mod_base = OTHER; note = 2'-O-methyl modified nucleotide
  modified_base 90: mod_base = OTHER; note = 2'-O-methyl modified nucleotide
  modified_base 91: mod_base = OTHER; note = 2'-O-methyl modified nucleotide
  modified_base 92: mod_base = OTHER; note = 2'-O-methyl modified nucleotide
  modified_base 93: mod_base = OTHER; note = 2'-O-methyl modified nucleotide
  modified_base 94: mod_base = OTHER; note = 2'-O-methyl modified nucleotide
  modified_base 95: mod_base = OTHER; note = 2'-O-methyl modified nucleotide
  modified_base 96: mod_base = OTHER; note = 2'-O-methyl modified nucleotide
  modified_base 116: mod_base = OTHER; note = Nucleotide with phosphorothioate linkage
  modified_base 117: mod_base = OTHER; note = 2'-O-methyl modified nucleotide with phosphorothioate linkage
  modified_base 118: mod_base = OTHER; note = 2'-O-methyl modified nucleotide with phosphorothioate linkage
  modified_base 119: mod_base = OTHER; note = 2'-O-methyl modified nucleotide
actcacgctggatagcctccgttttagagctagaaatagcaagttaaaataaggctagtccgttatcaacttgaaaaagtggcaccgagtcggtgcgcctggatgatggctatccagcg

SEQ ID NO: 17525 - RNA, 118 nt, synthetic construct
  source 1..118: mol_type = other RNA
  modified_base 1: mod_base = OTHER; note = 2'-O-methyl modified nucleotide with phosphorothioate linkage
  modified_base 2: mod_base = OTHER; note = 2'-O-methyl modified nucleotide with phosphorothioate linkage
  modified_base 3: mod_base = OTHER; note = 2'-O-methyl modified nucleotide with phosphorothioate linkage
  modified_base 29: mod_base = OTHER; note = 2'-O-methyl modified nucleotide
  modified_base 30: mod_base = OTHER; note = 2'-O-methyl modified nucleotide
  modified_base 31: mod_base = OTHER; note = 2'-O-methyl modified nucleotide
  modified_base 32: mod_base = OTHER; note = 2'-O-methyl modified nucleotide
  modified_base 33: mod_base = OTHER; note = 2'-O-methyl modified nucleotide
  modified_base 34: mod_base = OTHER; note = 2'-O-methyl modified nucleotide
  modified_base 35: mod_base = OTHER; note = 2'-O-methyl modified nucleotide
  modified_base 36: mod_base = OTHER; note = 2'-O-methyl modified nucleotide
  modified_base 37: mod_base = OTHER; note = 2'-O-methyl modified nucleotide
  modified_base 38: mod_base = OTHER; note = 2'-O-methyl modified nucleotide
  modified_base 39: mod_base = OTHER; note = 2'-O-methyl modified nucleotide
  modified_base 40: mod_base = OTHER; note = 2'-O-methyl modified nucleotide
  modified_base 69: mod_base = OTHER; note = 2'-O-methyl modified nucleotide
  modified_base 70: mod_base = OTHER; note = 2'-O-methyl modified nucleotide
  modified_base 71: mod_base = OTHER; note = 2'-O-methyl modified nucleotide
  modified_base 72: mod_base = OTHER; note = 2'-O-methyl modified nucleotide
  modified_base 73: mod_base = OTHER; note = 2'-O-methyl modified nucleotide
  modified_base 74: mod_base = OTHER; note = 2'-O-methyl modified nucleotide
  modified_base 75: mod_base = OTHER; note = 2'-O-methyl modified nucleotide
  modified_base 76: mod_base = OTHER; note = 2'-O-methyl modified nucleotide
  modified_base 77: mod_base = OTHER; note = 2'-O-methyl modified nucleotide
  modified_base 78: mod_base = OTHER; note = 2'-O-methyl modified nucleotide
  modified_base 79: mod_base = OTHER; note = 2'-O-methyl modified nucleotide
  modified_base 80: mod_base = OTHER; note = 2'-O-methyl modified nucleotide
  modified_base 81: mod_base = OTHER; note = 2'-O-methyl modified nucleotide
  modified_base 82: mod_base = OTHER; note = 2'-O-methyl modified nucleotide
  modified_base 83: mod_base = OTHER; note = 2'-O-methyl modified nucleotide
  modified_base 84: mod_base = OTHER; note = 2'-O-methyl modified nucleotide
  modified_base 85: mod_base = OTHER; note = 2'-O-methyl modified nucleotide
  modified_base 86: mod_base = OTHER; note = 2'-O-methyl modified nucleotide
  modified_base 87: mod_base = OTHER; note = 2'-O-methyl modified nucleotide
  modified_base 88: mod_base = OTHER; note = 2'-O-methyl modified nucleotide
  modified_base 89: mod_base = OTHER; note = 2'-O-methyl modified nucleotide
  modified_base 90: mod_base = OTHER; note = 2'-O-methyl modified nucleotide
  modified_base 91: mod_base = OTHER; note = 2'-O-methyl modified nucleotide
  modified_base 92: mod_base = OTHER; note = 2'-O-methyl modified nucleotide
  modified_base 93: mod_base = OTHER; note = 2'-O-methyl modified nucleotide
  modified_base 94: mod_base = OTHER; note = 2'-O-methyl modified nucleotide
  modified_base 95: mod_base = OTHER; note = 2'-O-methyl modified nucleotide
  modified_base 96: mod_base = OTHER; note = 2'-O-methyl modified nucleotide
  modified_base 115: mod_base = OTHER; note = Nucleotide with phosphorothioate linkage
  modified_base 116: mod_base = OTHER; note = 2'-O-methyl modified nucleotide with phosphorothioate linkage
  modified_base 117: mod_base = OTHER; note = 2'-O-methyl modified nucleotide with phosphorothioate linkage
  modified_base 118: mod_base = OTHER; note = 2'-O-methyl modified nucleotide
actcacgctggatagcctccgttttagagctagaaatagcaagttaaaataaggctagtccgttatcaacttgaaaaagtggcaccgagtcggtgcgcctggatgatggctatccagc

SEQ ID NO: 17526 - RNA, 117 nt, synthetic construct
  source 1..117: mol_type = other RNA
  modified_base 1: mod_base = OTHER; note = 2'-O-methyl modified nucleotide with phosphorothioate linkage
  modified_base 2: mod_base = OTHER; note = 2'-O-methyl modified nucleotide with phosphorothioate linkage
  modified_base 3: mod_base = OTHER; note = 2'-O-methyl modified nucleotide with phosphorothioate linkage
  modified_base 29: mod_base = OTHER; note = 2'-O-methyl modified nucleotide
  modified_base 30: mod_base = OTHER; note = 2'-O-methyl modified nucleotide
  modified_base 31: mod_base = OTHER; note = 2'-O-methyl modified nucleotide
  modified_base 32: mod_base = OTHER; note = 2'-O-methyl modified nucleotide
  modified_base 33: mod_base = OTHER; note = 2'-O-methyl modified nucleotide
  modified_base 34: mod_base = OTHER; note = 2'-O-methyl modified nucleotide
  modified_base 35: mod_base = OTHER; note = 2'-O-methyl modified nucleotide
  modified_base 36: mod_base = OTHER; note = 2'-O-methyl modified nucleotide
  modified_base 37: mod_base = OTHER; note = 2'-O-methyl modified nucleotide
  modified_base 38: mod_base = OTHER; note = 2'-O-methyl modified nucleotide
  modified_base 39: mod_base = OTHER; note = 2'-O-methyl modified nucleotide
  modified_base 40: mod_base = OTHER; note = 2'-O-methyl modified nucleotide
  modified_base 69: mod_base = OTHER; note = 2'-O-methyl modified nucleotide
  modified_base 70: mod_base = OTHER; note = 2'-O-methyl modified nucleotide
  modified_base 71: mod_base = OTHER; note = 2'-O-methyl modified nucleotide
  modified_base 72: mod_base = OTHER; note = 2'-O-methyl modified nucleotide
  modified_base 73: mod_base = OTHER; note = 2'-O-methyl modified nucleotide
  modified_base 74: mod_base = OTHER; note = 2'-O-methyl modified nucleotide
  modified_base 75: mod_base = OTHER; note = 2'-O-methyl modified nucleotide
  modified_base 76: mod_base = OTHER; note = 2'-O-methyl modified nucleotide
  modified_base 77: mod_base = OTHER; note = 2'-O-methyl modified nucleotide
  modified_base 78: mod_base = OTHER; note = 2'-O-methyl modified nucleotide
  modified_base 79: mod_base = OTHER; note = 2'-O-methyl modified nucleotide
  modified_base 80: mod_base = OTHER; note = 2'-O-methyl modified nucleotide
  modified_base 81: mod_base = OTHER; note = 2'-O-methyl modified nucleotide
  modified_base 82: mod_base = OTHER; note = 2'-O-methyl modified nucleotide
  modified_base 83: mod_base = OTHER; note = 2'-O-methyl modified nucleotide
  modified_base 84: mod_base = OTHER; note = 2'-O-methyl modified nucleotide
  modified_base 85: mod_base = OTHER; note = 2'-O-methyl modified nucleotide
  modified_base 86: mod_base = OTHER; note = 2'-O-methyl modified nucleotide
  modified_base 87: mod_base = OTHER; note = 2'-O-methyl modified nucleotide
  modified_base 88: mod_base = OTHER; note = 2'-O-methyl modified nucleotide
  modified_base 89: mod_base = OTHER; note = 2'-O-methyl modified nucleotide
  modified_base 90: mod_base = OTHER; note = 2'-O-methyl modified nucleotide
  modified_base 91: mod_base = OTHER; note = 2'-O-methyl modified nucleotide
  modified_base 92: mod_base = OTHER; note = 2'-O-methyl modified nucleotide
  modified_base 93: mod_base = OTHER; note = 2'-O-methyl modified nucleotide
  modified_base 94: mod_base = OTHER; note = 2'-O-methyl modified nucleotide
  modified_base 95: mod_base = OTHER; note = 2'-O-methyl modified nucleotide
  modified_base 96: mod_base = OTHER; note = 2'-O-methyl modified nucleotide
  modified_base 114: mod_base = OTHER; note = Nucleotide with phosphorothioate linkage
  modified_base 115: mod_base = OTHER; note = 2'-O-methyl modified nucleotide with phosphorothioate linkage
  modified_base 116: mod_base = OTHER; note = 2'-O-methyl modified nucleotide with phosphorothioate linkage
  modified_base 117: mod_base = OTHER; note = 2'-O-methyl modified nucleotide
actcacgctggatagcctccgttttagagctagaaatagcaagttaaaataaggctagtccgttatcaacttgaaaaagtggcaccgagtcggtgcgcctggatgatggctatccag

SEQ ID NO: 17527 - RNA, 116 nt, synthetic construct
  source 1..116: mol_type = other RNA
  modified_base 1: mod_base = OTHER; note = 2'-O-methyl modified nucleotide with phosphorothioate linkage
  modified_base 2: mod_base = OTHER; note = 2'-O-methyl modified nucleotide with phosphorothioate linkage
  modified_base 3: mod_base = OTHER; note = 2'-O-methyl modified nucleotide with phosphorothioate linkage
  modified_base 29: mod_base = OTHER; note = 2'-O-methyl modified nucleotide
  modified_base 30: mod_base = OTHER; note = 2'-O-methyl modified nucleotide
  modified_base 31: mod_base = OTHER; note = 2'-O-methyl modified nucleotide
  modified_base 32: mod_base = OTHER; note = 2'-O-methyl modified nucleotide
  modified_base 33: mod_base = OTHER; note = 2'-O-methyl modified nucleotide
  modified_base 34: mod_base = OTHER; note = 2'-O-methyl modified nucleotide
  modified_base 35: mod_base = OTHER; note = 2'-O-methyl modified nucleotide
  modified_base 36: mod_base = OTHER; note = 2'-O-methyl modified nucleotide
  modified_base 37: mod_base = OTHER; note = 2'-O-methyl modified nucleotide
  modified_base 38: mod_base = OTHER; note = 2'-O-methyl modified nucleotide
  modified_base 39: mod_base = OTHER; note = 2'-O-methyl modified nucleotide
  modified_base 40: mod_base = OTHER; note = 2'-O-methyl modified nucleotide
  modified_base 69: mod_base = OTHER; note = 2'-O-methyl modified nucleotide
  modified_base 70: mod_base = OTHER; note = 2'-O-methyl modified nucleotide
  modified_base 71: mod_base = OTHER; note = 2'-O-methyl modified nucleotide
  modified_base 72: mod_base = OTHER; note = 2'-O-methyl modified nucleotide
  modified_base 73: mod_base = OTHER; note = 2'-O-methyl modified nucleotide
  modified_base 74: mod_base = OTHER; note = 2'-O-methyl modified nucleotide
  modified_base 75: mod_base = OTHER; note = 2'-O-methyl modified nucleotide
  modified_base 76: mod_base = OTHER; note = 2'-O-methyl modified nucleotide
  modified_base 77: mod_base = OTHER; note = 2'-O-methyl modified nucleotide
  modified_base 78: mod_base = OTHER; note = 2'-O-methyl modified nucleotide
  modified_base 79: mod_base = OTHER; note = 2'-O-methyl modified nucleotide
  modified_base 80: mod_base = OTHER; note = 2'-O-methyl modified nucleotide
  modified_base 81: mod_base = OTHER; note = 2'-O-methyl modified nucleotide
  modified_base 82: mod_base = OTHER; note = 2'-O-methyl modified nucleotide
  modified_base 83: mod_base = OTHER; note = 2'-O-methyl modified nucleotide
  modified_base 84: mod_base = OTHER; note = 2'-O-methyl modified nucleotide
  modified_base 85: mod_base = OTHER; note = 2'-O-methyl modified nucleotide
  modified_base 86: mod_base = OTHER; note = 2'-O-methyl modified nucleotide
  modified_base 87: mod_base = OTHER; note = 2'-O-methyl modified nucleotide
  modified_base 88: mod_base = OTHER; note = 2'-O-methyl modified nucleotide
  modified_base 89: mod_base = OTHER; note = 2'-O-methyl modified nucleotide
  modified_base 90: mod_base = OTHER; note = 2'-O-methyl modified nucleotide
  modified_base 91: mod_base = OTHER; note = 2'-O-methyl modified nucleotide
  modified_base 92: mod_base = OTHER; note = 2'-O-methyl modified nucleotide
  modified_base 93: mod_base = OTHER; note = 2'-O-methyl modified nucleotide
  modified_base 94: mod_base = OTHER; note = 2'-O-methyl modified nucleotide
  modified_base 95: mod_base = OTHER; note = 2'-O-methyl modified nucleotide
  modified_base 96: mod_base = OTHER; note = 2'-O-methyl modified nucleotide
  modified_base 113: mod_base = OTHER; note = Nucleotide with phosphorothioate linkage
  modified_base 114: mod_base = OTHER; note = 2'-O-methyl modified nucleotide with phosphorothioate linkage
  modified_base 115: mod_base = OTHER; note = 2'-O-methyl modified nucleotide with phosphorothioate linkage
  modified_base 116: mod_base = OTHER; note = 2'-O-methyl modified nucleotide
actcacgctggatagcctccgttttagagctagaaatagcaagttaaaataaggctagtccgttatcaacttgaaaaagtggcaccgagtcggtgcgcctggatgatggctatcca

SEQ ID NO: 17528 - RNA, 115 nt, synthetic construct
  source 1..115: mol_type = other RNA
  modified_base 1: mod_base = OTHER; note = 2'-O-methyl modified nucleotide with phosphorothioate linkage
  modified_base 2: mod_base = OTHER; note = 2'-O-methyl modified nucleotide with phosphorothioate linkage
  modified_base 3: mod_base = OTHER; note = 2'-O-methyl modified nucleotide with phosphorothioate linkage
  modified_base 29: mod_base = OTHER; note = 2'-O-methyl modified nucleotide
  modified_base 30: mod_base = OTHER; note = 2'-O-methyl modified nucleotide
  modified_base 31: mod_base = OTHER; note = 2'-O-methyl modified nucleotide
  modified_base 32: mod_base = OTHER; note = 2'-O-methyl modified nucleotide
  modified_base 33: mod_base = OTHER; note = 2'-O-methyl modified nucleotide
  modified_base 34: mod_base = OTHER; note = 2'-O-methyl modified nucleotide
  modified_base 35: mod_base = OTHER; note = 2'-O-methyl modified nucleotide
  modified_base 36: mod_base = OTHER; note = 2'-O-methyl modified nucleotide
  modified_base 37: mod_base = OTHER; note = 2'-O-methyl modified nucleotide
  modified_base 38: mod_base = OTHER; note = 2'-O-methyl modified nucleotide
  modified_base 39: mod_base = OTHER; note = 2'-O-methyl modified nucleotide
  modified_base 40: mod_base = OTHER; note = 2'-O-methyl modified nucleotide
  modified_base 69: mod_base = OTHER; note = 2'-O-methyl modified nucleotide
  modified_base 70: mod_base = OTHER; note = 2'-O-methyl modified nucleotide
  modified_base 71: mod_base = OTHER; note = 2'-O-methyl modified nucleotide
  modified_base 72: mod_base = OTHER; note = 2'-O-methyl modified nucleotide
  modified_base 73: mod_base = OTHER; note = 2'-O-methyl modified nucleotide
  modified_base 74: mod_base = OTHER; note = 2'-O-methyl modified nucleotide
  modified_base 75: mod_base = OTHER; note = 2'-O-methyl modified nucleotide
  modified_base 76: mod_base = OTHER; note = 2'-O-methyl modified nucleotide
  modified_base 77: mod_base = OTHER; note = 2'-O-methyl modified nucleotide
  modified_base 78: mod_base = OTHER; note = 2'-O-methyl modified nucleotide
  modified_base 79: mod_base = OTHER; note = 2'-O-methyl modified nucleotide
  modified_base 80: mod_base = OTHER; note = 2'-O-methyl modified nucleotide
  modified_base 81: mod_base = OTHER; note = 2'-O-methyl modified nucleotide
  modified_base 82: mod_base = OTHER; note = 2'-O-methyl modified nucleotide
  modified_base 83: mod_base = OTHER; note = 2'-O-methyl modified nucleotide
  modified_base 84: mod_base = OTHER; note = 2'-O-methyl modified nucleotide
  modified_base 85: mod_base = OTHER; note = 2'-O-methyl modified nucleotide
  modified_base 86: mod_base = OTHER; note = 2'-O-methyl modified nucleotide
  modified_base 87: mod_base = OTHER; note = 2'-O-methyl modified nucleotide
  modified_base 88: mod_base = OTHER; note = 2'-O-methyl modified nucleotide
  modified_base 89: mod_base = OTHER; note = 2'-O-methyl modified nucleotide
  modified_base 90: mod_base = OTHER; note = 2'-O-methyl modified nucleotide
  modified_base 91: mod_base = OTHER; note = 2'-O-methyl modified nucleotide
  modified_base 92: mod_base = OTHER; note = 2'-O-methyl modified nucleotide
  modified_base 93: mod_base = OTHER; note = 2'-O-methyl modified nucleotide
  modified_base 94: mod_base = OTHER; note = 2'-O-methyl modified nucleotide
  modified_base 95: mod_base = OTHER; note = 2'-O-methyl modified nucleotide
  modified_base 96: mod_base = OTHER; note = 2'-O-methyl modified nucleotide
  modified_base 112: mod_base = OTHER; note = Nucleotide with phosphorothioate linkage
  modified_base 113: mod_base = OTHER; note = 2'-O-methyl modified nucleotide with phosphorothioate linkage
  modified_base 114: mod_base = OTHER; note = 2'-O-methyl modified nucleotide with phosphorothioate linkage
  modified_base 115: mod_base = OTHER; note = 2'-O-methyl modified nucleotide
actcacgctggatagcctccgttttagagctagaaatagcaagttaaaataaggctagtccgttatcaacttgaaaaagtggcaccgagtcggtgcgcctggatgatggctatcc

SEQ ID NO: 17529 - RNA, 122 nt, synthetic construct
  source 1..122: mol_type = other RNA
  modified_base 1: mod_base = OTHER; note = 2'-O-methyl modified nucleotide with phosphorothioate linkage
  modified_base 2: mod_base = OTHER; note = 2'-O-methyl modified nucleotide with phosphorothioate linkage
  modified_base 3: mod_base = OTHER; note = 2'-O-methyl modified nucleotide with phosphorothioate linkage
  modified_base 29: mod_base = OTHER; note = 2'-O-methyl modified nucleotide
  modified_base 30: mod_base = OTHER; note = 2'-O-methyl modified nucleotide
  modified_base 31: mod_base = OTHER; note = 2'-O-methyl modified nucleotide
  modified_base 32: mod_base = OTHER; note = 2'-O-methyl modified nucleotide
  modified_base 33: mod_base = OTHER; note = 2'-O-methyl modified nucleotide
  modified_base 34: mod_base = OTHER; note = 2'-O-methyl modified nucleotide
  modified_base 35: mod_base = OTHER; note = 2'-O-methyl modified nucleotide
  modified_base 36: mod_base = OTHER; note = 2'-O-methyl modified nucleotide
  modified_base 37: mod_base = OTHER; note = 2'-O-methyl modified nucleotide
  modified_base 38: mod_base = OTHER; note = 2'-O-methyl modified nucleotide
  modified_base 39: mod_base = OTHER; note = 2'-O-methyl modified nucleotide
  modified_base 40: mod_base = OTHER; note = 2'-O-methyl modified nucleotide
  modified_base 69: mod_base = OTHER; note = 2'-O-methyl modified nucleotide
  modified_base 70: mod_base = OTHER; note = 2'-O-methyl modified nucleotide
  modified_base 71: mod_base = OTHER; note = 2'-O-methyl modified nucleotide
  modified_base 72: mod_base = OTHER; note = 2'-O-methyl modified nucleotide
  modified_base 73: mod_base = OTHER; note = 2'-O-methyl modified nucleotide
  modified_base 74: mod_base = OTHER; note = 2'-O-methyl modified nucleotide
  modified_base 75: mod_base = OTHER; note = 2'-O-methyl modified nucleotide
  modified_base 76: mod_base = OTHER; note = 2'-O-methyl modified nucleotide
  modified_base 77: mod_base = OTHER; note = 2'-O-methyl modified nucleotide
  modified_base 78: mod_base = OTHER; note = 2'-O-methyl modified nucleotide
  modified_base 79: mod_base = OTHER; note = 2'-O-methyl modified nucleotide
  modified_base 80: mod_base = OTHER; note = 2'-O-methyl modified nucleotide
  modified_base 81: mod_base = OTHER; note = 2'-O-methyl modified nucleotide
  modified_base 82: mod_base = OTHER; note = 2'-O-methyl modified nucleotide
  modified_base 83: mod_base = OTHER; note = 2'-O-methyl modified nucleotide
  modified_base 84: mod_base = OTHER; note = 2'-O-methyl modified nucleotide
  modified_base 85: mod_base = OTHER; note = 2'-O-methyl modified nucleotide
  modified_base 86: mod_base = OTHER; note = 2'-O-methyl modified nucleotide
  modified_base 87: mod_base = OTHER; note = 2'-O-methyl modified nucleotide
  modified_base 88: mod_base = OTHER; note = 2'-O-methyl modified nucleotide
  modified_base 89: mod_base = OTHER; note = 2'-O-methyl modified nucleotide
  modified_base 90: mod_base = OTHER; note = 2'-O-methyl modified nucleotide
  modified_base 91: mod_base = OTHER; note = 2'-O-methyl modified nucleotide
  modified_base 92: mod_base = OTHER; note = 2'-O-methyl modified nucleotide
  modified_base 93: mod_base = OTHER; note = 2'-O-methyl modified nucleotide
  modified_base 94: mod_base = OTHER; note = 2'-O-methyl modified nucleotide
  modified_base 95: mod_base = OTHER; note = 2'-O-methyl modified nucleotide
  modified_base 96: mod_base = OTHER; note = 2'-O-methyl modified nucleotide
  modified_base 119: mod_base = OTHER; note = Nucleotide with phosphorothioate linkage
  modified_base 120: mod_base = OTHER; note = 2'-O-methyl modified nucleotide with phosphorothioate linkage
  modified_base 121: mod_base = OTHER; note = 2'-O-methyl modified nucleotide with phosphorothioate linkage
  modified_base 122: mod_base = OTHER; note = 2'-O-methyl modified nucleotide
actcacgctggatagcctccgttttagagctagaaatagcaagttaaaataaggctagtccgttatcaacttgaaaaagtggcaccgagtcggtgctggcctggatgatggctatccagcgt

SEQ ID NO: 17530 - RNA, 121 nt, synthetic construct
  source 1..121: mol_type = other RNA
  modified_base 1: mod_base = OTHER; note = 2'-O-methyl modified nucleotide with phosphorothioate linkage
  modified_base 2: mod_base = OTHER; note = 2'-O-methyl modified nucleotide with phosphorothioate linkage
  modified_base 3: mod_base = OTHER; note = 2'-O-methyl modified nucleotide with phosphorothioate linkage
  modified_base 29: mod_base = OTHER; note = 2'-O-methyl modified nucleotide
  modified_base 30: mod_base = OTHER; note = 2'-O-methyl modified nucleotide
  modified_base 31: mod_base = OTHER; note = 2'-O-methyl modified nucleotide
  modified_base 32: mod_base = OTHER; note = 2'-O-methyl modified nucleotide
  modified_base 33: mod_base = OTHER; note = 2'-O-methyl modified nucleotide
  modified_base 34: mod_base = OTHER; note = 2'-O-methyl modified nucleotide
  modified_base 35: mod_base = OTHER; note = 2'-O-methyl modified nucleotide
  modified_base 36: mod_base = OTHER; note = 2'-O-methyl modified nucleotide
  modified_base 37: mod_base = OTHER; note = 2'-O-methyl modified nucleotide
  modified_base 38: mod_base = OTHER; note = 2'-O-methyl modified nucleotide
  modified_base 39: mod_base = OTHER; note = 2'-O-methyl modified nucleotide
  modified_base 40: mod_base = OTHER; note = 2'-O-methyl modified nucleotide
  modified_base 69: mod_base = OTHER; note = 2'-O-methyl modified nucleotide
  modified_base 70: mod_base = OTHER; note = 2'-O-methyl modified nucleotide
  modified_base 71: mod_base = OTHER; note = 2'-O-methyl modified nucleotide
  modified_base 72: mod_base = OTHER; note = 2'-O-methyl modified nucleotide
  modified_base 73: mod_base = OTHER; note = 2'-O-methyl modified nucleotide
  modified_base 74: mod_base = OTHER; note = 2'-O-methyl modified nucleotide
  modified_base 75: mod_base = OTHER; note = 2'-O-methyl modified nucleotide
  modified_base 76: mod_base = OTHER; note = 2'-O-methyl modified nucleotide
  modified_base 77: mod_base = OTHER; note = 2'-O-methyl modified nucleotide
  modified_base 78: mod_base = OTHER; note = 2'-O-methyl modified nucleotide
  modified_base 79: mod_base = OTHER; note = 2'-O-methyl modified nucleotide
  modified_base 80: mod_base = OTHER; note = 2'-O-methyl modified nucleotide
  modified_base 81: mod_base = OTHER; note = 2'-O-methyl modified nucleotide
  modified_base 82: mod_base = OTHER; note = 2'-O-methyl modified nucleotide
  modified_base 83: mod_base = OTHER; note = 2'-O-methyl modified nucleotide
  modified_base 84: mod_base = OTHER; note = 2'-O-methyl modified nucleotide
  modified_base 85: mod_base = OTHER; note = 2'-O-methyl modified nucleotide
  modified_base 86: mod_base = OTHER; note = 2'-O-methyl modified nucleotide
  modified_base 87: mod_base = OTHER; note = 2'-O-methyl modified nucleotide
  modified_base 88: mod_base = OTHER; note = 2'-O-methyl modified nucleotide
  modified_base 89: mod_base = OTHER; note = 2'-O-methyl modified nucleotide
  modified_base 90: mod_base = OTHER; note = 2'-O-methyl modified nucleotide
  modified_base 91: mod_base = OTHER; note = 2'-O-methyl modified nucleotide
  modified_base 92: mod_base = OTHER; note = 2'-O-methyl modified nucleotide
  modified_base 93: mod_base = OTHER; note = 2'-O-methyl modified nucleotide
  modified_base 94: mod_base = OTHER; note = 2'-O-methyl modified nucleotide
  modified_base 95: mod_base = OTHER; note = 2'-O-methyl modified nucleotide
  modified_base 96: mod_base = OTHER; note = 2'-O-methyl modified nucleotide
  modified_base 118: mod_base = OTHER; note = Nucleotide with phosphorothioate linkage
  modified_base 119: mod_base = OTHER; note = 2'-O-methyl modified nucleotide with phosphorothioate linkage
  modified_base 120: mod_base = OTHER; note = 2'-O-methyl modified nucleotide with phosphorothioate linkage
  modified_base 121: mod_base = OTHER; note = 2'-O-methyl modified nucleotide
actcacgctggatagcctccgttttagagctagaaatagcaagttaaaataaggctagtccgttatcaacttgaaaaagtggcaccgagtcggtgctggcctggatgatggctatccagcg

SEQ ID NO: 17531 - RNA, 120 nt, synthetic construct
  source 1..120: mol_type = other RNA
  modified_base 1: mod_base = OTHER; note = 2'-O-methyl modified nucleotide with phosphorothioate linkage
  modified_base 2: mod_base = OTHER; note = 2'-O-methyl modified nucleotide with phosphorothioate linkage
  modified_base 3: mod_base = OTHER; note = 2'-O-methyl modified nucleotide with phosphorothioate linkage
  modified_base 29: mod_base = OTHER; note = 2'-O-methyl modified nucleotide
  modified_base 30: mod_base = OTHER; note = 2'-O-methyl modified nucleotide
  modified_base 31: mod_base = OTHER; note = 2'-O-methyl modified nucleotide
  modified_base 32: mod_base = OTHER; note = 2'-O-methyl modified nucleotide
  modified_base 33: mod_base = OTHER; note = 2'-O-methyl modified nucleotide
  modified_base 34: mod_base = OTHER; note = 2'-O-methyl modified nucleotide
  modified_base 35: mod_base = OTHER; note = 2'-O-methyl modified nucleotide
  modified_base 36: mod_base = OTHER; note = 2'-O-methyl modified nucleotide
  modified_base 37: mod_base = OTHER; note = 2'-O-methyl modified nucleotide
  modified_base 38: mod_base = OTHER; note = 2'-O-methyl modified nucleotide
  modified_base 39: mod_base = OTHER; note = 2'-O-methyl modified nucleotide
  modified_base 40: mod_base = OTHER; note = 2'-O-methyl modified nucleotide
  modified_base 69: mod_base = OTHER; note = 2'-O-methyl modified nucleotide
  modified_base 70: mod_base = OTHER; note = 2'-O-methyl modified nucleotide
  modified_base 71: mod_base = OTHER; note = 2'-O-methyl modified nucleotide
  modified_base 72: mod_base = OTHER; note = 2'-O-methyl modified nucleotide
  modified_base 73: mod_base = OTHER; note = 2'-O-methyl modified nucleotide
  modified_base 74: mod_base = OTHER; note = 2'-O-methyl modified nucleotide
  modified_base 75: mod_base = OTHER; note = 2'-O-methyl modified nucleotide
  modified_base 76: mod_base = OTHER; note = 2'-O-methyl modified nucleotide
  modified_base 77: mod_base = OTHER; note = 2'-O-methyl modified nucleotide
  modified_base 78: mod_base = OTHER; note = 2'-O-methyl modified nucleotide
  modified_base 79: mod_base = OTHER; note = 2'-O-methyl modified nucleotide
  modified_base 80: mod_base = OTHER; note = 2'-O-methyl modified nucleotide
  modified_base 81: mod_base = OTHER; note = 2'-O-methyl modified nucleotide
  modified_base 82: mod_base = OTHER; note = 2'-O-methyl modified nucleotide
  modified_base 83: mod_base = OTHER; note = 2'-O-methyl modified nucleotide
  modified_base 84: mod_base = OTHER; note = 2'-O-methyl modified nucleotide
  modified_base 85: mod_base = OTHER; note = 2'-O-methyl modified nucleotide
  modified_base 86: mod_base = OTHER; note = 2'-O-methyl modified nucleotide
  modified_base 87: mod_base = OTHER; note = 2'-O-methyl modified nucleotide
  modified_base 88: mod_base = OTHER; note = 2'-O-methyl modified nucleotide
  modified_base 89: mod_base = OTHER; note = 2'-O-methyl modified nucleotide
  modified_base 90: mod_base = OTHER; note = 2'-O-methyl modified nucleotide
  modified_base 91: mod_base = OTHER; note = 2'-O-methyl modified nucleotide
  modified_base 92: mod_base = OTHER; note = 2'-O-methyl modified nucleotide
  modified_base 93: mod_base = OTHER; note = 2'-O-methyl modified nucleotide
  modified_base 94: mod_base = OTHER; note = 2'-O-methyl modified nucleotide
  modified_base 95: mod_base = OTHER; note = 2'-O-methyl modified nucleotide
  modified_base 96: mod_base = OTHER; note = 2'-O-methyl modified nucleotide
  modified_base 117: mod_base = OTHER; note = Nucleotide with phosphorothioate linkage
  modified_base 118: mod_base = OTHER; note = 2'-O-methyl modified nucleotide with phosphorothioate linkage
  modified_base 119: mod_base = OTHER; note = 2'-O-methyl modified nucleotide with phosphorothioate linkage
  modified_base 120: mod_base = OTHER; note = 2'-O-methyl modified nucleotide
actcacgctggatagcctccgttttagagctagaaatagcaagttaaaataaggctagtccgttatcaacttgaaaaagtggcaccgagtcggtgctggcctggatgatggctatccagc

SEQ ID NO: 17532 - RNA, 119 nt, synthetic construct
  source 1..119: mol_type = other RNA
  modified_base 1: mod_base = OTHER; note = 2'-O-methyl modified nucleotide with phosphorothioate linkage
  modified_base 2: mod_base = OTHER; note = 2'-O-methyl modified nucleotide with phosphorothioate linkage
  modified_base 3: mod_base = OTHER; note = 2'-O-methyl modified nucleotide with phosphorothioate linkage
  modified_base 29: mod_base = OTHER; note = 2'-O-methyl modified nucleotide
  modified_base 30: mod_base = OTHER; note = 2'-O-methyl modified nucleotide
  modified_base 31: mod_base = OTHER; note = 2'-O-methyl modified nucleotide
  modified_base 32: mod_base = OTHER; note = 2'-O-methyl modified nucleotide
  modified_base 33: mod_base = OTHER; note = 2'-O-methyl modified nucleotide
  modified_base 34: mod_base = OTHER; note = 2'-O-methyl modified nucleotide
  modified_base 35: mod_base = OTHER; note = 2'-O-methyl modified nucleotide
  modified_base 36: mod_base = OTHER; note = 2'-O-methyl modified nucleotide
  modified_base 37: mod_base = OTHER; note = 2'-O-methyl modified nucleotide
  modified_base 38: mod_base = OTHER; note = 2'-O-methyl modified nucleotide
  modified_base 39: mod_base = OTHER; note = 2'-O-methyl modified nucleotide
  modified_base 40: mod_base = OTHER; note = 2'-O-methyl modified nucleotide
  modified_base 69: mod_base = OTHER; note = 2'-O-methyl modified nucleotide
  modified_base 70: mod_base = OTHER; note = 2'-O-methyl modified nucleotide
  modified_base 71: mod_base = OTHER; note = 2'-O-methyl modified nucleotide
  modified_base 72: mod_base = OTHER; note = 2'-O-methyl modified nucleotide
  modified_base 73: mod_base = OTHER; note = 2'-O-methyl modified nucleotide
  modified_base 74: mod_base = OTHER; note = 2'-O-methyl modified nucleotide
  modified_base 75: mod_base = OTHER; note = 2'-O-methyl modified nucleotide
  modified_base 76: mod_base = OTHER; note = 2'-O-methyl modified nucleotide
  modified_base 77: mod_base = OTHER; note = 2'-O-methyl modified nucleotide
  modified_base 78: mod_base = OTHER; note = 2'-O-methyl modified nucleotide
  modified_base 79: mod_base = OTHER; note = 2'-O-methyl modified nucleotide
  modified_base 80: mod_base = OTHER; note = 2'-O-methyl modified nucleotide
  modified_base 81: mod_base = OTHER; note = 2'-O-methyl modified nucleotide
  modified_base 82: mod_base = OTHER; note = 2'-O-methyl modified nucleotide
  modified_base 83: mod_base = OTHER; note = 2'-O-methyl modified nucleotide
  modified_base 84: mod_base = OTHER; note = 2'-O-methyl modified nucleotide
  modified_base 85: mod_base = OTHER; note = 2'-O-methyl modified nucleotide
  modified_base 86: mod_base = OTHER; note = 2'-O-methyl modified nucleotide
  modified_base 87: mod_base = OTHER; note = 2'-O-methyl modified nucleotide
  modified_base 88: mod_base = OTHER; note = 2'-O-methyl modified nucleotide
  modified_base 89: mod_base = OTHER; note = 2'-O-methyl modified nucleotide
  modified_base 90: mod_base = OTHER; note = 2'-O-methyl modified nucleotide
  modified_base 91: mod_base = OTHER; note = 2'-O-methyl modified nucleotide
  modified_base 92: mod_base = OTHER; note = 2'-O-methyl modified nucleotide
  modified_base 93: mod_base = OTHER; note = 2'-O-methyl modified nucleotide
  modified_base 94: mod_base = OTHER; note = 2'-O-methyl modified nucleotide
  modified_base 95: mod_base = OTHER; note = 2'-O-methyl modified nucleotide
  modified_base 96: mod_base = OTHER; note = 2'-O-methyl modified nucleotide
  modified_base 116: mod_base = OTHER; note = Nucleotide with phosphorothioate linkage
  modified_base 117: mod_base = OTHER; note = 2'-O-methyl modified nucleotide with phosphorothioate linkage
  modified_base 118: mod_base = OTHER; note = 2'-O-methyl modified nucleotide with phosphorothioate linkage
  modified_base 119: mod_base = OTHER; note = 2'-O-methyl modified nucleotide
actcacgctggatagcctccgttttagagctagaaatagcaagttaaaataaggctagtccgttatcaacttgaaaaagtggcaccgagtcggtgctggcctggatgatggctatccag

SEQ ID NO: 17533 - RNA, 118 nt, synthetic construct
  source 1..118: mol_type = other RNA
  modified_base 1: mod_base = OTHER; note = 2'-O-methyl modified nucleotide with phosphorothioate linkage
  modified_base 2: mod_base = OTHER; note = 2'-O-methyl modified nucleotide with phosphorothioate linkage
  modified_base 3: mod_base = OTHER; note = 2'-O-methyl modified nucleotide with phosphorothioate linkage
  modified_base 29: mod_base = OTHER; note = 2'-O-methyl modified nucleotide
  modified_base 30: mod_base = OTHER; note = 2'-O-methyl modified nucleotide
  modified_base 31: mod_base = OTHER; note = 2'-O-methyl modified nucleotide
  modified_base 32: mod_base = OTHER; note = 2'-O-methyl modified nucleotide
  modified_base 33: mod_base = OTHER; note = 2'-O-methyl modified nucleotide
  modified_base 34: mod_base = OTHER; note = 2'-O-methyl modified nucleotide
  modified_base 35: mod_base = OTHER; note = 2'-O-methyl modified nucleotide
  modified_base 36: mod_base = OTHER; note = 2'-O-methyl modified nucleotide
  modified_base 37: mod_base = OTHER; note = 2'-O-methyl modified nucleotide
  modified_base 38: mod_base = OTHER; note = 2'-O-methyl modified nucleotide
  modified_base 39: mod_base = OTHER; note = 2'-O-methyl modified nucleotide
  modified_base 40: mod_base = OTHER; note = 2'-O-methyl modified nucleotide
  modified_base 69: mod_base = OTHER; note = 2'-O-methyl modified nucleotide
  modified_base 70: mod_base = OTHER; note = 2'-O-methyl modified nucleotide
  modified_base 71: mod_base = OTHER; note = 2'-O-methyl modified nucleotide
  modified_base 72: mod_base = OTHER; note = 2'-O-methyl modified nucleotide
  modified_base 73: mod_base = OTHER; note = 2'-O-methyl modified nucleotide
  modified_base 74: mod_base = OTHER; note = 2'-O-methyl modified nucleotide
  modified_base 75: mod_base = OTHER; note = 2'-O-methyl modified nucleotide
  modified_base 76: mod_base = OTHER; note = 2'-O-methyl modified nucleotide
  modified_base 77: mod_base = OTHER; note = 2'-O-methyl modified nucleotide
  modified_base 78: mod_base = OTHER; note = 2'-O-methyl modified nucleotide
  modified_base 79: mod_base = OTHER; note = 2'-O-methyl modified nucleotide
  modified_base 80: mod_base = OTHER; note = 2'-O-methyl modified nucleotide
  modified_base 81: mod_base = OTHER; note = 2'-O-methyl modified nucleotide
  modified_base 82: mod_base = OTHER; note = 2'-O-methyl modified nucleotide
  modified_base 83: mod_base = OTHER; note = 2'-O-methyl modified nucleotide
  modified_base 84: mod_base = OTHER; note = 2'-O-methyl modified nucleotide
  modified_base 85: mod_base = OTHER; note = 2'-O-methyl modified nucleotide
  modified_base 86: mod_base = OTHER; note = 2'-O-methyl modified nucleotide
  modified_base 87: mod_base = OTHER; note = 2'-O-methyl modified nucleotide
  modified_base 88: mod_base = OTHER; note = 2'-O-methyl modified nucleotide
  modified_base 89: mod_base = OTHER; note = 2'-O-methyl modified nucleotide
  modified_base 90: mod_base = OTHER; note = 2'-O-methyl modified nucleotide
  modified_base 91: mod_base = OTHER; note = 2'-O-methyl modified nucleotide
  modified_base 92: mod_base = OTHER; note = 2'-O-methyl modified nucleotide
  modified_base 93: mod_base = OTHER; note = 2'-O-methyl modified nucleotide
  modified_base 94: mod_base = OTHER; note = 2'-O-methyl modified nucleotide
  modified_base 95: mod_base = OTHER; note = 2'-O-methyl modified nucleotide
  modified_base 96: mod_base = OTHER; note = 2'-O-methyl modified nucleotide
  modified_base 115: mod_base = OTHER; note = Nucleotide with phosphorothioate linkage
  modified_base 116: mod_base = OTHER; note = 2'-O-methyl modified nucleotide with phosphorothioate linkage
  modified_base 117: mod_base = OTHER; note = 2'-O-methyl modified nucleotide with phosphorothioate linkage
  modified_base 118: mod_base = OTHER; note = 2'-O-methyl modified nucleotide
actcacgctggatagcctccgttttagagctagaaatagcaagttaaaataaggctagtccgttatcaacttgaaaaagtggcaccgagtcggtgctggcctggatgatggctatcca

SEQ ID NO: 17534 - RNA, 117 nt, synthetic construct
  source 1..117: mol_type = other RNA
  modified_base 1: mod_base = OTHER; note = 2'-O-methyl modified nucleotide with phosphorothioate linkage
  modified_base 2: mod_base = OTHER; note = 2'-O-methyl modified nucleotide with phosphorothioate linkage
  modified_base 3: mod_base = OTHER; note = 2'-O-methyl modified nucleotide with phosphorothioate linkage
  modified_base 29: mod_base = OTHER; note = 2'-O-methyl modified nucleotide
  modified_base 30: mod_base = OTHER; note = 2'-O-methyl modified nucleotide
  modified_base 31: mod_base = OTHER; note = 2'-O-methyl modified nucleotide
  modified_base 32: mod_base = OTHER; note = 2'-O-methyl modified nucleotide
  modified_base 33: mod_base = OTHER; note = 2'-O-methyl modified nucleotide
  modified_base 34: mod_base = OTHER; note = 2'-O-methyl modified nucleotide
  modified_base 35: mod_base = OTHER; note = 2'-O-methyl modified nucleotide
  modified_base 36: mod_base = OTHER; note = 2'-O-methyl modified nucleotide
  modified_base 37: mod_base = OTHER; note = 2'-O-methyl modified nucleotide
  modified_base 38: mod_base = OTHER; note = 2'-O-methyl modified nucleotide
  modified_base 39: mod_base = OTHER; note = 2'-O-methyl modified nucleotide
  modified_base 40: mod_base = OTHER; note = 2'-O-methyl modified nucleotide
  modified_base 69: mod_base = OTHER; note = 2'-O-methyl modified nucleotide
  modified_base 70: mod_base = OTHER; note = 2'-O-methyl modified nucleotide
  modified_base 71: mod_base = OTHER; note = 2'-O-methyl modified nucleotide
  modified_base 72: mod_base = OTHER; note = 2'-O-methyl modified nucleotide
  modified_base 73: mod_base = OTHER; note = 2'-O-methyl modified nucleotide
  modified_base 74: mod_base = OTHER; note = 2'-O-methyl modified nucleotide
  modified_base 75: mod_base = OTHER; note = 2'-O-methyl modified nucleotide
  modified_base 76: mod_base = OTHER; note = 2'-O-methyl modified nucleotide
  modified_base 77: mod_base = OTHER; note = 2'-O-methyl modified nucleotide
  modified_base 78: mod_base = OTHER; note = 2'-O-methyl modified nucleotide
  modified_base 79: mod_base = OTHER; note = 2'-O-methyl modified nucleotide
  modified_base 80: mod_base = OTHER; note = 2'-O-methyl modified nucleotide
  modified_base 81: mod_base = OTHER; note = 2'-O-methyl modified nucleotide
  modified_base 82: mod_base = OTHER; note = 2'-O-methyl modified nucleotide
  modified_base 83: mod_base = OTHER; note = 2'-O-methyl modified nucleotide
  modified_base 84: mod_base = OTHER; note = 2'-O-methyl modified nucleotide
  modified_base 85: mod_base = OTHER; note = 2'-O-methyl modified nucleotide
  modified_base 86: mod_base = OTHER; note = 2'-O-methyl modified nucleotide
  modified_base 87: mod_base = OTHER; note = 2'-O-methyl modified nucleotide
  modified_base 88: mod_base = OTHER; note = 2'-O-methyl modified nucleotide
  modified_base 89: mod_base = OTHER; note = 2'-O-methyl modified nucleotide
  modified_base 90: mod_base = OTHER; note = 2'-O-methyl modified nucleotide
  modified_base 91: mod_base = OTHER; note = 2'-O-methyl modified nucleotide
  modified_base 92: mod_base = OTHER; note = 2'-O-methyl modified nucleotide
  modified_base 93: mod_base = OTHER; note = 2'-O-methyl modified nucleotide
  modified_base 94: mod_base = OTHER; note = 2'-O-methyl modified nucleotide
  modified_base 95: mod_base = OTHER; note = 2'-O-methyl modified nucleotide
  modified_base 96: mod_base = OTHER; note = 2'-O-methyl modified nucleotide
  modified_base 114: mod_base = OTHER; note = Nucleotide with phosphorothioate linkage
  modified_base 115: mod_base = OTHER; note = 2'-O-methyl modified nucleotide with phosphorothioate linkage
  modified_base 116: mod_base = OTHER; note = 2'-O-methyl modified nucleotide with phosphorothioate linkage
  modified_base 117: mod_base = OTHER; note = 2'-O-methyl modified nucleotide
actcacgctggatagcctccgttttagagctagaaatagcaagttaaaataaggctagtccgttatcaacttgaaaaagtggcaccgagtcggtgctggcctggatgatggctatcc

SEQ ID NO: 17535 - RNA, 124 nt, synthetic construct
  source 1..124: mol_type = other RNA
  modified_base 1: mod_base = OTHER; note = 2'-O-methyl modified nucleotide with phosphorothioate linkage
  modified_base 2: mod_base = OTHER; note = 2'-O-methyl modified nucleotide with phosphorothioate linkage
  modified_base 3: mod_base = OTHER; note = 2'-O-methyl modified nucleotide with phosphorothioate linkage
  modified_base 29: mod_base = OTHER; note = 2'-O-methyl modified nucleotide
  modified_base 30: mod_base = OTHER; note = 2'-O-methyl modified nucleotide
  modified_base 31: mod_base = OTHER; note = 2'-O-methyl modified nucleotide
  modified_base 32: mod_base = OTHER; note = 2'-O-methyl modified nucleotide
  modified_base 33: mod_base = OTHER; note = 2'-O-methyl modified nucleotide
  modified_base 34: mod_base = OTHER; note = 2'-O-methyl modified nucleotide
  modified_base 35: mod_base = OTHER; note = 2'-O-methyl modified nucleotide
  modified_base 36: mod_base = OTHER; note = 2'-O-methyl modified nucleotide
  modified_base 37: mod_base = OTHER; note = 2'-O-methyl modified nucleotide
  modified_base 38: mod_base = OTHER; note = 2'-O-methyl modified nucleotide
  modified_base 39: mod_base = OTHER; note = 2'-O-methyl modified nucleotide
  modified_base 40: mod_base = OTHER; note = 2'-O-methyl modified nucleotide
  modified_base 69: mod_base = OTHER; note = 2'-O-methyl modified nucleotide
  modified_base 70: mod_base = OTHER; note = 2'-O-methyl modified nucleotide
  modified_base 71: mod_base = OTHER; note = 2'-O-methyl modified nucleotide
  modified_base 72: mod_base = OTHER; note = 2'-O-methyl modified nucleotide
  modified_base 73: mod_base = OTHER; note = 2'-O-methyl modified nucleotide
  modified_base 74: mod_base = OTHER; note = 2'-O-methyl modified nucleotide
  modified_base 75: mod_base = OTHER; note = 2'-O-methyl modified nucleotide
  modified_base 76: mod_base = OTHER; note = 2'-O-methyl modified nucleotide
  modified_base 77: mod_base = OTHER; note = 2'-O-methyl modified nucleotide
  modified_base 78: mod_base = OTHER; note = 2'-O-methyl modified nucleotide
  modified_base 79: mod_base = OTHER; note = 2'-O-methyl modified nucleotide
  modified_base 80: mod_base = OTHER; note = 2'-O-methyl modified nucleotide
  modified_base 81: mod_base = OTHER; note = 2'-O-methyl modified nucleotide
  modified_base 82: mod_base = OTHER; note = 2'-O-methyl modified nucleotide
  modified_base 83: mod_base = OTHER; note = 2'-O-methyl modified nucleotide
  modified_base 84: mod_base = OTHER; note = 2'-O-methyl modified nucleotide
  modified_base 85: mod_base = OTHER; note = 2'-O-methyl modified nucleotide
  modified_base 86: mod_base = OTHER; note = 2'-O-methyl modified nucleotide
  modified_base 87: mod_base = OTHER; note = 2'-O-methyl modified nucleotide
  modified_base 88: mod_base = OTHER; note = 2'-O-methyl modified nucleotide
  modified_base 89: mod_base = OTHER; note = 2'-O-methyl modified nucleotide
  modified_base 90: mod_base = OTHER; note = 2'-O-methyl modified nucleotide
  modified_base 91: mod_base = OTHER; note = 2'-O-methyl modified nucleotide
  modified_base 92: mod_base = OTHER; note = 2'-O-methyl modified nucleotide
  modified_base 93: mod_base = OTHER; note = 2'-O-methyl modified nucleotide
  modified_base 94: mod_base = OTHER; note = 2'-O-methyl modified nucleotide
  modified_base 95: mod_base = OTHER; note = 2'-O-methyl modified nucleotide
  modified_base 96: mod_base = OTHER; note = 2'-O-methyl modified nucleotide
  modified_base 121: mod_base = OTHER; note = Nucleotide with phosphorothioate linkage
  modified_base 122: mod_base = OTHER; note = 2'-O-methyl modified nucleotide with phosphorothioate linkage
  modified_base 123: mod_base = OTHER; note = 2'-O-methyl modified nucleotide with phosphorothioate linkage
  modified_base 124: mod_base = OTHER; note = 2'-O-methyl modified nucleotide
actcacgctggatagcctccgttttagagctagaaatagcaagttaaaataaggctagtccgttatcaacttgaaaaagtggcaccgagtcggtgctctggcctggatgatggctatccagcgt

SEQ ID NO: 17536 - RNA, 123 nt, synthetic construct
  source 1..123: mol_type = other RNA
  modified_base 1: mod_base = OTHER; note = 2'-O-methyl modified nucleotide with phosphorothioate linkage
  modified_base 2: mod_base = OTHER; note = 2'-O-methyl modified nucleotide with phosphorothioate linkage
  modified_base 3: mod_base = OTHER; note = 2'-O-methyl modified nucleotide with phosphorothioate linkage
  modified_base 29: mod_base = OTHER; note = 2'-O-methyl modified nucleotide
  modified_base 30: mod_base = OTHER; note = 2'-O-methyl modified nucleotide
  modified_base 31: mod_base = OTHER; note = 2'-O-methyl modified nucleotide
  modified_base 32: mod_base = OTHER; note = 2'-O-methyl modified nucleotide
  modified_base 33: mod_base = OTHER; note = 2'-O-methyl modified nucleotide
  modified_base 34: mod_base = OTHER; note = 2'-O-methyl modified nucleotide
  modified_base 35: mod_base = OTHER; note = 2'-O-methyl modified nucleotide
  modified_base 36: mod_base = OTHER; note = 2'-O-methyl modified nucleotide
  modified_base 37: mod_base = OTHER; note = 2'-O-methyl modified nucleotide
  modified_base 38: mod_base = OTHER; note = 2'-O-methyl modified nucleotide
  modified_base 39: mod_base = OTHER; note = 2'-O-methyl modified nucleotide
  modified_base 40: mod_base = OTHER; note = 2'-O-methyl modified nucleotide
  modified_base 69: mod_base = OTHER; note = 2'-O-methyl modified nucleotide
  modified_base 70: mod_base = OTHER; note = 2'-O-methyl modified nucleotide
  modified_base 71: mod_base = OTHER; note = 2'-O-methyl modified nucleotide
  modified_base 72: mod_base = OTHER; note = 2'-O-methyl modified nucleotide
  modified_base 73: mod_base = OTHER; note = 2'-O-methyl modified nucleotide
  modified_base 74: mod_base = OTHER; note = 2'-O-methyl modified nucleotide
  modified_base 75: mod_base = OTHER; note = 2'-O-methyl modified nucleotide
  modified_base 76: mod_base = OTHER; note = 2'-O-methyl modified nucleotide
  modified_base 77: mod_base = OTHER; note = 2'-O-methyl modified nucleotide
  modified_base 78: mod_base = OTHER; note = 2'-O-methyl modified nucleotide
  modified_base 79: mod_base = OTHER; note = 2'-O-methyl modified nucleotide
  modified_base 80: mod_base = OTHER; note = 2'-O-methyl modified nucleotide
  modified_base 81: mod_base = OTHER; note = 2'-O-methyl modified nucleotide
  modified_base 82: mod_base = OTHER; note = 2'-O-methyl modified nucleotide
  modified_base 83: mod_base = OTHER; note = 2'-O-methyl modified nucleotide
  modified_base 84: mod_base = OTHER; note = 2'-O-methyl modified nucleotide
  modified_base 85: mod_base = OTHER; note = 2'-O-methyl modified nucleotide
  modified_base 86: mod_base = OTHER; note = 2'-O-methyl modified nucleotide
  modified_base 87: mod_base = OTHER; note = 2'-O-methyl modified nucleotide
  modified_base 88: mod_base = OTHER; note = 2'-O-methyl modified nucleotide
  modified_base 89: mod_base = OTHER; note = 2'-O-methyl modified nucleotide
  modified_base 90: mod_base = OTHER; note = 2'-O-methyl modified nucleotide
  modified_base 91: mod_base = OTHER; note = 2'-O-methyl modified nucleotide
  modified_base 92: mod_base = OTHER; note = 2'-O-methyl modified nucleotide
  modified_base 93: mod_base = OTHER; note = 2'-O-methyl modified nucleotide
  modified_base 94: mod_base = OTHER; note = 2'-O-methyl modified nucleotide
  modified_base 95: mod_base = OTHER; note = 2'-O-methyl modified nucleotide
  modified_base 96: mod_base = OTHER; note = 2'-O-methyl modified nucleotide
  modified_base 120: mod_base = OTHER; note = Nucleotide with phosphorothioate linkage
  modified_base 121: mod_base = OTHER; note = 2'-O-methyl modified nucleotide with phosphorothioate linkage
  modified_base 122: mod_base = OTHER; note = 2'-O-methyl modified nucleotide with phosphorothioate linkage
  modified_base 123: mod_base = OTHER; note = 2'-O-methyl modified nucleotide
actcacgctggatagcctccgttttagagctagaaatagcaagttaaaataaggctagtccgttatcaacttgaaaaagtggcaccgagtcggtgctctggcctggatgatggctatccagcg

SEQ ID NO: 17537 - RNA, 122 nt, synthetic construct
  source 1..122: mol_type = other RNA
  modified_base 1: mod_base = OTHER; note = 2'-O-methyl modified nucleotide with phosphorothioate linkage
  modified_base 2: mod_base = OTHER; note = 2'-O-methyl modified nucleotide with phosphorothioate linkage
  modified_base 3: mod_base = OTHER; note = 2'-O-methyl modified nucleotide with phosphorothioate linkage
  modified_base 29: mod_base = OTHER; note = 2'-O-methyl modified nucleotide
  modified_base 30: mod_base = OTHER; note = 2'-O-methyl modified nucleotide
  modified_base 31: mod_base = OTHER; note = 2'-O-methyl modified nucleotide
  modified_base 32: mod_base = OTHER; note = 2'-O-methyl modified nucleotide
  modified_base 33: mod_base = OTHER; note = 2'-O-methyl modified nucleotide
  modified_base 34: mod_base = OTHER; note = 2'-O-methyl modified nucleotide
  modified_base 35: mod_base = OTHER; note = 2'-O-methyl modified nucleotide
  modified_base 36: mod_base = OTHER; note = 2'-O-methyl modified nucleotide
  modified_base 37: mod_base = OTHER; note = 2'-O-methyl modified nucleotide
  modified_base 38: mod_base = OTHER; note = 2'-O-methyl modified nucleotide
  modified_base 39: mod_base = OTHER; note = 2'-O-methyl modified nucleotide
  modified_base 40: mod_base = OTHER; note = 2'-O-methyl modified nucleotide
  modified_base 69: mod_base = OTHER; note = 2'-O-methyl modified nucleotide
  modified_base 70: mod_base = OTHER; note = 2'-O-methyl modified nucleotide
  modified_base 71: mod_base = OTHER; note = 2'-O-methyl modified nucleotide
  modified_base 72: mod_base = OTHER; note = 2'-O-methyl modified nucleotide
  modified_base 73: mod_base = OTHER; note = 2'-O-methyl modified nucleotide
  modified_base 74: mod_base = OTHER; note = 2'-O-methyl modified nucleotide
  modified_base 75: mod_base = OTHER; note = 2'-O-methyl modified nucleotide
  modified_base 76: mod_base = OTHER; note = 2'-O-methyl modified nucleotide
  modified_base 77: mod_base = OTHER; note = 2'-O-methyl modified nucleotide
  modified_base 78: mod_base = OTHER; note = 2'-O-methyl modified nucleotide
  modified_base 79: mod_base = OTHER; note = 2'-O-methyl modified nucleotide
  modified_base 80: mod_base = OTHER; note = 2'-O-methyl modified nucleotide
  modified_base 81: mod_base = OTHER; note = 2'-O-methyl modified nucleotide
  modified_base 82: mod_base = OTHER; note = 2'-O-methyl modified nucleotide
  modified_base 83: mod_base = OTHER; note = 2'-O-methyl modified nucleotide
  modified_base 84: mod_base = OTHER; note = 2'-O-methyl modified nucleotide
  modified_base 85: mod_base = OTHER; note = 2'-O-methyl modified nucleotide
  modified_base 86: mod_base = OTHER; note = 2'-O-methyl modified nucleotide
  modified_base 87: mod_base = OTHER; note = 2'-O-methyl modified nucleotide
  modified_base 88: mod_base = OTHER; note = 2'-O-methyl modified nucleotide
  modified_base 89: mod_base = OTHER; note = 2'-O-methyl modified nucleotide
  modified_base 90: mod_base = OTHER; note = 2'-O-methyl modified nucleotide
  modified_base 91: mod_base = OTHER; note = 2'-O-methyl modified nucleotide
  modified_base 92: mod_base = OTHER; note = 2'-O-methyl modified nucleotide
  modified_base 93: mod_base = OTHER; note = 2'-O-methyl modified nucleotide
  modified_base 94: mod_base = OTHER; note = 2'-O-methyl modified nucleotide
  modified_base 95: mod_base = OTHER; note = 2'-O-methyl modified nucleotide
  modified_base 96: mod_base = OTHER; note = 2'-O-methyl modified nucleotide
  modified_base 119: mod_base = OTHER; note = Nucleotide with phosphorothioate linkage
  modified_base 120: mod_base = OTHER; note = 2'-O-methyl modified nucleotide with phosphorothioate linkage
  modified_base 121: mod_base = OTHER; note = 2'-O-methyl modified nucleotide with phosphorothioate linkage
  modified_base 122: mod_base = OTHER; note = 2'-O-methyl modified nucleotide
actcacgctggatagcctccgttttagagctagaaatagcaagttaaaataaggctagtccgttatcaacttgaaaaagtggcaccgagtcggtgctctggcctggatgatggctatccagc

SEQ ID NO: 17538 - RNA, 121 nt, synthetic construct
  source 1..121: mol_type = other RNA
  modified_base 1: mod_base = OTHER; note = 2'-O-methyl modified nucleotide with phosphorothioate linkage
  modified_base 2: mod_base = OTHER; note = 2'-O-methyl modified nucleotide with phosphorothioate linkage
  modified_base 3: mod_base = OTHER; note = 2'-O-methyl modified nucleotide with phosphorothioate linkage
  modified_base 29: mod_base = OTHER; note = 2'-O-methyl modified nucleotide
  modified_base 30: mod_base = OTHER; note = 2'-O-methyl modified nucleotide
  modified_base 31: mod_base = OTHER; note = 2'-O-methyl modified nucleotide
  modified_base 32: mod_base = OTHER; note = 2'-O-methyl modified nucleotide
  modified_base 33: mod_base = OTHER; note = 2'-O-methyl modified nucleotide
  modified_base 34: mod_base = OTHER; note = 2'-O-methyl modified nucleotide
  modified_base 35: mod_base = OTHER; note = 2'-O-methyl modified nucleotide
  modified_base 36: mod_base = OTHER; note = 2'-O-methyl modified nucleotide
  modified_base 37: mod_base = OTHER; note = 2'-O-methyl modified nucleotide
  modified_base 38: mod_base = OTHER; note = 2'-O-methyl modified nucleotide
  modified_base 39: mod_base = OTHER; note = 2'-O-methyl modified nucleotide
  modified_base 40: mod_base = OTHER; note = 2'-O-methyl modified nucleotide
  modified_base 69: mod_base = OTHER; note = 2'-O-methyl modified nucleotide
  modified_base 70: mod_base = OTHER; note = 2'-O-methyl modified nucleotide
  modified_base 71: mod_base = OTHER; note = 2'-O-methyl modified nucleotide
  modified_base 72: mod_base = OTHER; note = 2'-O-methyl modified nucleotide
  modified_base 73: mod_base = OTHER; note = 2'-O-methyl modified nucleotide
  modified_base 74: mod_base = OTHER; note = 2'-O-methyl modified nucleotide
  modified_base 75: mod_base = OTHER; note = 2'-O-methyl modified nucleotide
  modified_base 76: mod_base = OTHER; note = 2'-O-methyl modified nucleotide
  modified_base 77: mod_base = OTHER; note = 2'-O-methyl modified nucleotide
  modified_base 78: mod_base = OTHER; note = 2'-O-methyl modified nucleotide
  modified_base 79: mod_base = OTHER; note = 2'-O-methyl modified nucleotide
  modified_base 80: mod_base = OTHER; note = 2'-O-methyl modified nucleotide
  modified_base 81: mod_base = OTHER; note = 2'-O-methyl modified nucleotide
  modified_base 82: mod_base = OTHER; note = 2'-O-methyl modified nucleotide
  modified_base 83: mod_base = OTHER; note = 2'-O-methyl modified nucleotide
  modified_base 84: mod_base = OTHER; note = 2'-O-methyl modified nucleotide
  modified_base 85: mod_base = OTHER; note = 2'-O-methyl modified nucleotide
  modified_base 86: mod_base = OTHER; note = 2'-O-methyl modified nucleotide
  modified_base 87: mod_base = OTHER; note = 2'-O-methyl modified nucleotide
  modified_base 88: mod_base = OTHER; note = 2'-O-methyl modified nucleotide
  modified_base 89: mod_base = OTHER; note = 2'-O-methyl modified nucleotide
  modified_base 90: mod_base = OTHER; note = 2'-O-methyl modified nucleotide
  modified_base 91: mod_base = OTHER; note = 2'-O-methyl modified nucleotide
  modified_base 92: mod_base = OTHER; note = 2'-O-methyl modified nucleotide
  modified_base 93: mod_base = OTHER; note = 2'-O-methyl modified nucleotide
  modified_base 94: mod_base = OTHER; note = 2'-O-methyl modified nucleotide
  modified_base 95: mod_base = OTHER; note = 2'-O-methyl modified nucleotide
  modified_base 96: mod_base = OTHER; note = 2'-O-methyl modified nucleotide
  modified_base 118: mod_base = OTHER; note = Nucleotide with phosphorothioate linkage
  modified_base 119: mod_base = OTHER; note = 2'-O-methyl modified nucleotide with phosphorothioate linkage
  modified_base 120: mod_base = OTHER; note = 2'-O-methyl modified nucleotide with phosphorothioate linkage
  modified_base 121: mod_base = OTHER; note = 2'-O-methyl modified nucleotide
actcacgctggatagcctccgttttagagctagaaatagcaagttaaaataaggctagtccgttatcaacttgaaaaagtggcaccgagtcggtgctctggcctggatgatggctatccag

SEQ ID NO: 17539 - RNA, 120 nt, synthetic construct
  source 1..120: mol_type = other RNA
  modified_base 1: mod_base = OTHER; note = 2'-O-methyl modified nucleotide with phosphorothioate linkage
  modified_base 2: mod_base = OTHER; note = 2'-O-methyl modified nucleotide with phosphorothioate linkage
  modified_base 3: mod_base = OTHER; note = 2'-O-methyl modified nucleotide with phosphorothioate linkage
  modified_base 29: mod_base = OTHER; note = 2'-O-methyl modified nucleotide
  modified_base 30: mod_base = OTHER; note = 2'-O-methyl modified nucleotide
  modified_base 31: mod_base = OTHER; note = 2'-O-methyl modified nucleotide
  modified_base 32: mod_base = OTHER; note = 2'-O-methyl modified nucleotide
  modified_base 33: mod_base = OTHER; note = 2'-O-methyl modified nucleotide
  modified_base 34: mod_base = OTHER; note = 2'-O-methyl modified nucleotide
  modified_base 35: mod_base = OTHER; note = 2'-O-methyl modified nucleotide
  modified_base 36: mod_base = OTHER; note = 2'-O-methyl modified nucleotide
  modified_base 37: mod_base = OTHER; note = 2'-O-methyl modified nucleotide
  modified_base 38: mod_base = OTHER; note = 2'-O-methyl modified nucleotide
  modified_base 39: mod_base = OTHER; note = 2'-O-methyl modified nucleotide
  modified_base 40: mod_base = OTHER; note = 2'-O-methyl modified nucleotide
  modified_base 69: mod_base = OTHER; note = 2'-O-methyl modified nucleotide
  modified_base 70: mod_base = OTHER; note = 2'-O-methyl modified nucleotide
  modified_base 71: mod_base = OTHER; note = 2'-O-methyl modified nucleotide
  modified_base 72: mod_base = OTHER; note = 2'-O-methyl modified nucleotide
  modified_base 73: mod_base = OTHER; note = 2'-O-methyl modified nucleotide
  modified_base 74: mod_base = OTHER; note = 2'-O-methyl modified nucleotide
  modified_base 75: mod_base = OTHER; note = 2'-O-methyl modified nucleotide
  modified_base 76: mod_base = OTHER; note = 2'-O-methyl modified nucleotide
  modified_base 77: mod_base = OTHER; note = 2'-O-methyl modified nucleotide
  modified_base 78: mod_base = OTHER; note = 2'-O-methyl modified nucleotide
  modified_base 79: mod_base = OTHER; note = 2'-O-methyl modified nucleotide
  modified_base 80: mod_base = OTHER; note = 2'-O-methyl modified nucleotide
  modified_base 81: mod_base = OTHER; note = 2'-O-methyl modified nucleotide
  modified_base 82: mod_base = OTHER; note = 2'-O-methyl modified nucleotide
  modified_base 83: mod_base = OTHER; note = 2'-O-methyl modified nucleotide
  modified_base 84: mod_base = OTHER; note = 2'-O-methyl modified nucleotide
  modified_base 85: mod_base = OTHER; note = 2'-O-methyl modified nucleotide
  modified_base 86: mod_base = OTHER; note = 2'-O-methyl modified nucleotide
  modified_base 87: mod_base = OTHER; note = 2'-O-methyl modified nucleotide
  modified_base 88: mod_base = OTHER; note = 2'-O-methyl modified nucleotide
  modified_base 89: mod_base = OTHER; note = 2'-O-methyl modified nucleotide
  modified_base 90: mod_base = OTHER; note = 2'-O-methyl modified nucleotide
  modified_base 91: mod_base = OTHER; note = 2'-O-methyl modified nucleotide
  modified_base 92: mod_base = OTHER; note = 2'-O-methyl modified nucleotide
  modified_base 93: mod_base = OTHER; note = 2'-O-methyl modified nucleotide
  modified_base 94: mod_base = OTHER; note = 2'-O-methyl modified nucleotide
  modified_base 95: mod_base = OTHER; note = 2'-O-methyl modified nucleotide
  modified_base 96: mod_base = OTHER; note = 2'-O-methyl modified nucleotide
  modified_base 117: mod_base = OTHER; note = Nucleotide with phosphorothioate linkage
  modified_base 118: mod_base = OTHER; note = 2'-O-methyl modified nucleotide with phosphorothioate linkage
  modified_base 119: mod_base = OTHER; note = 2'-O-methyl modified nucleotide with phosphorothioate linkage
  modified_base 120: mod_base = OTHER; note = 2'-O-methyl modified nucleotide
actcacgctggatagcctccgttttagagctagaaatagcaagttaaaataaggctagtccgttatcaacttgaaaaagtggcaccgagtcggtgctctggcctggatgatggctatcca

SEQ ID NO: 17540 - RNA, 119 nt, synthetic construct
  source 1..119: mol_type = other RNA
  modified_base 1: mod_base = OTHER; note = 2'-O-methyl modified nucleotide with phosphorothioate linkage
  modified_base 2: mod_base = OTHER; note = 2'-O-methyl modified nucleotide with phosphorothioate linkage
  modified_base 3: mod_base = OTHER; note = 2'-O-methyl modified nucleotide with phosphorothioate linkage
  modified_base 29: mod_base = OTHER; note = 2'-O-methyl modified nucleotide
  modified_base 30: mod_base = OTHER; note = 2'-O-methyl modified nucleotide
  modified_base 31: mod_base = OTHER; note = 2'-O-methyl modified nucleotide
  modified_base 32: mod_base = OTHER; note = 2'-O-methyl modified nucleotide
  modified_base 33: mod_base = OTHER; note = 2'-O-methyl modified nucleotide
  modified_base 34: mod_base = OTHER; note = 2'-O-methyl modified nucleotide
  modified_base 35: mod_base = OTHER; note = 2'-O-methyl modified nucleotide
  modified_base 36: mod_base = OTHER; note = 2'-O-methyl modified nucleotide
  modified_base 37: mod_base = OTHER; note = 2'-O-methyl modified nucleotide
  modified_base 38: mod_base = OTHER; note = 2'-O-methyl modified nucleotide
  modified_base 39: mod_base = OTHER; note = 2'-O-methyl modified nucleotide
  modified_base 40: mod_base = OTHER; note = 2'-O-methyl modified nucleotide
  modified_base 69: mod_base = OTHER; note = 2'-O-methyl modified nucleotide
  modified_base 70: mod_base = OTHER; note = 2'-O-methyl modified nucleotide
  modified_base 71: mod_base = OTHER; note = 2'-O-methyl modified nucleotide
  modified_base 72: mod_base = OTHER; note = 2'-O-methyl modified nucleotide
  modified_base 73: mod_base = OTHER; note = 2'-O-methyl modified nucleotide
  modified_base 74: mod_base = OTHER; note = 2'-O-methyl modified nucleotide
  modified_base 75: mod_base = OTHER; note = 2'-O-methyl modified nucleotide
  modified_base 76: mod_base = OTHER; note = 2'-O-methyl modified nucleotide
  modified_base 77: mod_base = OTHER; note = 2'-O-methyl modified nucleotide
  modified_base 78: mod_base = OTHER; note = 2'-O-methyl modified nucleotide
  modified_base 79: mod_base = OTHER; note = 2'-O-methyl modified nucleotide
  modified_base 80: mod_base = OTHER; note = 2'-O-methyl modified nucleotide
  modified_base 81: mod_base = OTHER; note = 2'-O-methyl modified nucleotide
  modified_base 82: mod_base = OTHER; note = 2'-O-methyl modified nucleotide
  modified_base 83: mod_base = OTHER; note = 2'-O-methyl modified nucleotide
  modified_base 84: mod_base = OTHER; note = 2'-O-methyl modified nucleotide
  modified_base 85: mod_base = OTHER; note = 2'-O-methyl modified nucleotide
  modified_base 86: mod_base = OTHER; note = 2'-O-methyl modified nucleotide
  modified_base 87: mod_base = OTHER; note = 2'-O-methyl modified nucleotide
  modified_base 88: mod_base = OTHER; note = 2'-O-methyl modified nucleotide
  modified_base 89: mod_base = OTHER; note = 2'-O-methyl modified nucleotide
  modified_base 90: mod_base = OTHER; note = 2'-O-methyl modified nucleotide
  modified_base 91: mod_base = OTHER; note = 2'-O-methyl modified nucleotide
  modified_base 92: mod_base = OTHER; note = 2'-O-methyl modified nucleotide
  modified_base 93: mod_base = OTHER; note = 2'-O-methyl modified nucleotide
  modified_base 94: mod_base = OTHER; note = 2'-O-methyl modified nucleotide
  modified_base 95: mod_base = OTHER; note = 2'-O-methyl modified nucleotide
  modified_base 96: mod_base = OTHER; note = 2'-O-methyl modified nucleotide
  modified_base 116: mod_base = OTHER; note = Nucleotide with phosphorothioate linkage
  modified_base 117: mod_base = OTHER; note = 2'-O-methyl modified nucleotide with phosphorothioate linkage
  modified_base 118: mod_base = OTHER; note = 2'-O-methyl modified nucleotide with phosphorothioate linkage
  modified_base 119: mod_base = OTHER; note = 2'-O-methyl modified nucleotide
actcacgctggatagcctccgttttagagctagaaatagcaagttaaaataaggctagtccgttatcaacttgaaaaagtggcaccgagtcggtgctctggcctggatgatggctatcc

SEQ ID NO: 17541 - RNA, 126 nt, synthetic construct
  source 1..126: mol_type = other RNA
  modified_base 1: mod_base = OTHER; note = 2'-O-methyl modified nucleotide with phosphorothioate linkage
  modified_base 2: mod_base = OTHER; note = 2'-O-methyl modified nucleotide with phosphorothioate linkage
  modified_base 3: mod_base = OTHER; note = 2'-O-methyl modified nucleotide with phosphorothioate linkage
  modified_base 29: mod_base = OTHER; note = 2'-O-methyl modified nucleotide
  modified_base 30: mod_base = OTHER; note = 2'-O-methyl modified nucleotide
  modified_base 31: mod_base = OTHER; note = 2'-O-methyl modified nucleotide
  modified_base 32: mod_base = OTHER; note = 2'-O-methyl modified nucleotide
  modified_base 33: mod_base = OTHER; note = 2'-O-methyl modified nucleotide
  modified_base 34: mod_base = OTHER; note = 2'-O-methyl modified nucleotide
  modified_base 35: mod_base = OTHER; note = 2'-O-methyl modified nucleotide
  modified_base 36: mod_base = OTHER; note = 2'-O-methyl modified nucleotide
  modified_base 37: mod_base = OTHER; note = 2'-O-methyl modified nucleotide
  modified_base 38: mod_base = OTHER; note = 2'-O-methyl modified nucleotide
  modified_base 39: mod_base = OTHER; note = 2'-O-methyl modified nucleotide
  modified_base 40: mod_base = OTHER; note = 2'-O-methyl modified nucleotide
  modified_base 69: mod_base = OTHER; note = 2'-O-methyl modified nucleotide
  modified_base 70: mod_base = OTHER; note = 2'-O-methyl modified nucleotide
  modified_base 71: mod_base = OTHER; note = 2'-O-methyl modified nucleotide
  modified_base 72: mod_base = OTHER; note = 2'-O-methyl modified nucleotide
  modified_base 73: mod_base = OTHER; note = 2'-O-methyl modified nucleotide
  modified_base 74: mod_base = OTHER; note = 2'-O-methyl modified nucleotide
  modified_base 75: mod_base = OTHER; note = 2'-O-methyl modified nucleotide
  modified_base 76: mod_base = OTHER; note = 2'-O-methyl modified nucleotide
  modified_base 77: mod_base = OTHER; note = 2'-O-methyl modified nucleotide
  modified_base 78: mod_base = OTHER; note = 2'-O-methyl modified nucleotide
  modified_base 79: mod_base = OTHER; note = 2'-O-methyl modified nucleotide
  modified_base 80: mod_base = OTHER; note = 2'-O-methyl modified nucleotide
  modified_base 81: mod_base = OTHER; note = 2'-O-methyl modified nucleotide
  modified_base 82: mod_base = OTHER; note = 2'-O-methyl modified nucleotide
  modified_base 83: mod_base = OTHER; note = 2'-O-methyl modified nucleotide
  modified_base 84: mod_base = OTHER; note = 2'-O-methyl modified nucleotide
  modified_base 85: mod_base = OTHER; note = 2'-O-methyl modified nucleotide
  modified_base 86: mod_base = OTHER; note = 2'-O-methyl modified nucleotide
  modified_base 87: mod_base = OTHER; note = 2'-O-methyl modified nucleotide
  modified_base 88: mod_base = OTHER; note = 2'-O-methyl modified nucleotide
  modified_base 89: mod_base = OTHER; note = 2'-O-methyl modified nucleotide
  modified_base 90: mod_base = OTHER; note = 2'-O-methyl modified nucleotide
  modified_base 91: mod_base = OTHER; note = 2'-O-methyl modified nucleotide
  modified_base 92: mod_base = OTHER; note = 2'-O-methyl modified nucleotide
  modified_base 93: mod_base = OTHER; note = 2'-O-methyl modified nucleotide
  modified_base 94: mod_base = OTHER; note = 2'-O-methyl modified nucleotide
  modified_base 95: mod_base = OTHER; note = 2'-O-methyl modified nucleotide
  modified_base 96: mod_base = OTHER; note = 2'-O-methyl modified nucleotide
  modified_base 123: mod_base = OTHER; note = Nucleotide with phosphorothioate linkage
  modified_base 124: mod_base = OTHER; note = 2'-O-methyl modified nucleotide with phosphorothioate linkage
  modified_base 125: mod_base = OTHER; note = 2'-O-methyl modified nucleotide with phosphorothioate linkage
  modified_base 126: mod_base = OTHER; note = 2'-O-methyl modified nucleotide
actcacgctggatagcctccgttttagagctagaaatagcaagttaaaataaggctagtccgttatcaacttgaaaaagtggcaccgagtcggtgctttctggcctggatgatggctatccagcgt

SEQ ID NO: 17542 - RNA, 125 nt, synthetic construct
  source 1..125: mol_type = other RNA
  modified_base 1: mod_base = OTHER; note = 2'-O-methyl modified nucleotide with phosphorothioate linkage
  modified_base 2: mod_base = OTHER; note = 2'-O-methyl modified nucleotide with phosphorothioate linkage
  modified_base 3: mod_base = OTHER; note = 2'-O-methyl modified nucleotide with phosphorothioate linkage
  modified_base 29: mod_base = OTHER; note = 2'-O-methyl modified nucleotide
  modified_base 30: mod_base = OTHER; note = 2'-O-methyl modified nucleotide
  modified_base 31: mod_base = OTHER; note = 2'-O-methyl modified nucleotide
  modified_base 32: mod_base = OTHER; note = 2'-O-methyl modified nucleotide
  modified_base 33: mod_base = OTHER; note = 2'-O-methyl modified nucleotide
  modified_base 34: mod_base = OTHER; note = 2'-O-methyl modified nucleotide
  modified_base 35: mod_base = OTHER; note = 2'-O-methyl modified nucleotide
  modified_base 36: mod_base = OTHER; note = 2'-O-methyl modified nucleotide
  modified_base 37: mod_base = OTHER; note = 2'-O-methyl modified nucleotide
  modified_base 38: mod_base = OTHER; note = 2'-O-methyl modified nucleotide
  modified_base 39: mod_base = OTHER; note = 2'-O-methyl modified nucleotide
  modified_base 40: mod_base = OTHER; note = 2'-O-methyl modified nucleotide
  modified_base 69: mod_base = OTHER; note = 2'-O-methyl modified nucleotide
  modified_base 70: mod_base = OTHER; note = 2'-O-methyl modified nucleotide
  modified_base 71: mod_base = OTHER; note = 2'-O-methyl modified nucleotide
  modified_base 72: mod_base = OTHER; note = 2'-O-methyl modified nucleotide
  modified_base 73: mod_base = OTHER; note = 2'-O-methyl modified nucleotide
  modified_base 74: mod_base = OTHER; note = 2'-O-methyl modified nucleotide
  modified_base 75: mod_base = OTHER; note = 2'-O-methyl modified nucleotide
  modified_base 76: mod_base = OTHER; note = 2'-O-methyl modified nucleotide
  modified_base 77: mod_base = OTHER; note = 2'-O-methyl modified nucleotide
  modified_base 78: mod_base = OTHER; note = 2'-O-methyl modified nucleotide
  modified_base 79: mod_base = OTHER; note = 2'-O-methyl modified nucleotide
  modified_base 80: mod_base = OTHER; note = 2'-O-methyl modified nucleotide
  modified_base 81: mod_base = OTHER; note = 2'-O-methyl modified nucleotide
  modified_base 82: mod_base = OTHER; note = 2'-O-methyl modified nucleotide
  modified_base 83: mod_base = OTHER; note = 2'-O-methyl modified nucleotide
  modified_base 84: mod_base = OTHER; note = 2'-O-methyl modified nucleotide
  modified_base 85: mod_base = OTHER; note = 2'-O-methyl modified nucleotide
  modified_base 86: mod_base = OTHER; note = 2'-O-methyl modified nucleotide
  modified_base 87: mod_base = OTHER; note = 2'-O-methyl modified nucleotide
  modified_base 88: mod_base = OTHER; note = 2'-O-methyl modified nucleotide
  modified_base 89: mod_base = OTHER; note = 2'-O-methyl modified nucleotide
  modified_base 90: mod_base = OTHER; note = 2'-O-methyl modified nucleotide
  modified_base 91: mod_base = OTHER; note = 2'-O-methyl modified nucleotide
  modified_base 92: mod_base = OTHER; note = 2'-O-methyl modified nucleotide
  modified_base 93: mod_base = OTHER; note = 2'-O-methyl modified nucleotide
  modified_base 94: mod_base = OTHER; note = 2'-O-methyl modified nucleotide
  modified_base 95: mod_base = OTHER; note = 2'-O-methyl modified nucleotide
  modified_base 96: mod_base = OTHER; note = 2'-O-methyl modified nucleotide
  modified_base 122: mod_base = OTHER; note = Nucleotide with phosphorothioate linkage
  modified_base 123: mod_base = OTHER; note = 2'-O-methyl modified nucleotide with phosphorothioate linkage
  modified_base 124: mod_base = OTHER; note = 2'-O-methyl modified nucleotide with phosphorothioate linkage
  modified_base 125: mod_base = OTHER; note = 2'-O-methyl modified nucleotide
actcacgctggatagcctccgttttagagctagaaatagcaagttaaaataaggctagtccgttatcaacttgaaaaagtggcaccgagtcggtgctttctggcctggatgatggctatccagcg

SEQ ID NO: 17543 - RNA, 124 nt, synthetic construct
  source 1..124: mol_type = other RNA
  modified_base 1: mod_base = OTHER; note = 2'-O-methyl modified nucleotide with phosphorothioate linkage
  modified_base 2: mod_base = OTHER; note = 2'-O-methyl modified nucleotide with phosphorothioate linkage
  modified_base 3: mod_base = OTHER; note = 2'-O-methyl modified nucleotide with phosphorothioate linkage
  modified_base 29: mod_base = OTHER; note = 2'-O-methyl modified nucleotide
  modified_base 30: mod_base = OTHER; note = 2'-O-methyl modified nucleotide
  modified_base 31: mod_base = OTHER; note = 2'-O-methyl modified nucleotide
  modified_base 32: mod_base = OTHER; note = 2'-O-methyl modified nucleotide
  modified_base 33: mod_base = OTHER; note = 2'-O-methyl modified nucleotide
  modified_base 34: mod_base = OTHER; note = 2'-O-methyl modified nucleotide
  modified_base 35: mod_base = OTHER; note = 2'-O-methyl modified nucleotide
  modified_base 36: mod_base = OTHER; note = 2'-O-methyl modified nucleotide
  modified_base 37: mod_base = OTHER; note = 2'-O-methyl modified nucleotide
  modified_base 38: mod_base = OTHER; note = 2'-O-methyl modified nucleotide
  modified_base 39: mod_base = OTHER; note = 2'-O-methyl modified nucleotide
  modified_base 40: mod_base = OTHER; note = 2'-O-methyl modified nucleotide
  modified_base 69: mod_base = OTHER; note = 2'-O-methyl modified nucleotide
  modified_base 70: mod_base = OTHER; note = 2'-O-methyl modified nucleotide
  modified_base 71: mod_base = OTHER; note = 2'-O-methyl modified nucleotide
  modified_base 72: mod_base = OTHER; note = 2'-O-methyl modified nucleotide
  modified_base 73: mod_base = OTHER; note = 2'-O-methyl modified nucleotide
  modified_base 74: mod_base = OTHER; note = 2'-O-methyl modified nucleotide
  modified_base 75: mod_base = OTHER; note = 2'-O-methyl modified nucleotide
  modified_base 76: mod_base = OTHER; note = 2'-O-methyl modified nucleotide
  modified_base 77: mod_base = OTHER; note = 2'-O-methyl modified nucleotide
  modified_base 78: mod_base = OTHER; note = 2'-O-methyl modified nucleotide
  modified_base 79: mod_base = OTHER; note = 2'-O-methyl modified nucleotide
  modified_base 80: mod_base = OTHER; note = 2'-O-methyl modified nucleotide
  modified_base 81: mod_base = OTHER; note = 2'-O-methyl modified nucleotide
  modified_base 82: mod_base = OTHER; note = 2'-O-methyl modified nucleotide
  modified_base 83: mod_base = OTHER; note = 2'-O-methyl modified nucleotide
  modified_base 84: mod_base = OTHER; note = 2'-O-methyl modified nucleotide
  modified_base 85: mod_base = OTHER; note = 2'-O-methyl modified nucleotide
  modified_base 86: mod_base = OTHER; note = 2'-O-methyl modified nucleotide
  modified_base 87: mod_base = OTHER; note = 2'-O-methyl modified nucleotide
  modified_base 88: mod_base = OTHER; note = 2'-O-methyl modified nucleotide
  modified_base 89: mod_base = OTHER; note = 2'-O-methyl modified nucleotide
  modified_base 90: mod_base = OTHER; note = 2'-O-methyl modified nucleotide
  modified_base 91: mod_base = OTHER; note = 2'-O-methyl modified nucleotide
  modified_base 92: mod_base = OTHER; note = 2'-O-methyl modified nucleotide
  modified_base 93: mod_base = OTHER; note = 2'-O-methyl modified nucleotide
  modified_base 94: mod_base = OTHER; note = 2'-O-methyl modified nucleotide
  modified_base 95: mod_base = OTHER; note = 2'-O-methyl modified nucleotide
  modified_base 96: mod_base = OTHER; note = 2'-O-methyl modified nucleotide
  modified_base 121: mod_base = OTHER; note = Nucleotide with phosphorothioate linkage
  modified_base 122: mod_base = OTHER; note = 2'-O-methyl modified nucleotide with phosphorothioate linkage
  modified_base 123: mod_base = OTHER; note = 2'-O-methyl modified nucleotide with phosphorothioate linkage
  modified_base 124: mod_base = OTHER; note = 2'-O-methyl modified nucleotide
actcacgctggatagcctccgttttagagctagaaatagcaagttaaaataaggctagtccgttatcaacttgaaaaagtggcaccgagtcggtgctttctggcctggatgatggctatccagc

SEQ ID NO: 17544 - RNA, 123 nt, synthetic construct
  source 1..123: mol_type = other RNA
  modified_base 1: mod_base = OTHER; note = 2'-O-methyl modified nucleotide with phosphorothioate linkage
  modified_base 2: mod_base = OTHER; note = 2'-O-methyl modified nucleotide with phosphorothioate linkage
  modified_base 3: mod_base = OTHER; note = 2'-O-methyl modified nucleotide with phosphorothioate linkage
  modified_base 29: mod_base = OTHER; note = 2'-O-methyl modified nucleotide
  modified_base 30: mod_base = OTHER; note = 2'-O-methyl modified nucleotide
  modified_base 31: mod_base = OTHER; note = 2'-O-methyl modified nucleotide
  modified_base 32: mod_base = OTHER; note = 2'-O-methyl modified nucleotide
  modified_base 33: mod_base = OTHER; note = 2'-O-methyl modified nucleotide
  modified_base 34: mod_base = OTHER; note = 2'-O-methyl modified nucleotide
  modified_base 35: mod_base = OTHER; note = 2'-O-methyl modified nucleotide
  modified_base 36: mod_base = OTHER; note = 2'-O-methyl modified nucleotide
  modified_base 37: mod_base = OTHER; note = 2'-O-methyl modified nucleotide
  modified_base 38: mod_base = OTHER; note = 2'-O-methyl modified nucleotide
  modified_base 39: mod_base = OTHER; note = 2'-O-methyl modified nucleotide
  modified_base 40: mod_base = OTHER; note = 2'-O-methyl modified nucleotide
  modified_base 69: mod_base = OTHER; note = 2'-O-methyl modified nucleotide
  modified_base 70: mod_base = OTHER; note = 2'-O-methyl modified nucleotide
  modified_base 71: mod_base = OTHER; note = 2'-O-methyl modified nucleotide
  modified_base 72: mod_base = OTHER; note = 2'-O-methyl modified nucleotide
  modified_base 73: mod_base = OTHER; note = 2'-O-methyl modified nucleotide
  modified_base 74: mod_base = OTHER; note = 2'-O-methyl modified nucleotide
  modified_base 75: mod_base = OTHER; note = 2'-O-methyl modified nucleotide
  modified_base 76: mod_base = OTHER; note = 2'-O-methyl modified nucleotide
  modified_base 77: mod_base = OTHER; note = 2'-O-methyl modified nucleotide
  modified_base 78: mod_base = OTHER; note = 2'-O-methyl modified nucleotide
  modified_base 79: mod_base = OTHER; note = 2'-O-methyl modified nucleotide
  modified_base 80: mod_base = OTHER; note = 2'-O-methyl modified nucleotide
  modified_base 81: mod_base = OTHER; note = 2'-O-methyl modified nucleotide
  modified_base 82: mod_base = OTHER; note = 2'-O-methyl modified nucleotide
  modified_base 83: mod_base = OTHER; note = 2'-O-methyl modified nucleotide
  modified_base 84: mod_base = OTHER; note = 2'-O-methyl modified nucleotide
  modified_base 85: mod_base = OTHER; note = 2'-O-methyl modified nucleotide
  modified_base 86: mod_base = OTHER; note = 2'-O-methyl modified nucleotide
  modified_base 87: mod_base = OTHER; note = 2'-O-methyl modified nucleotide
  modified_base 88: mod_base = OTHER; note = 2'-O-methyl modified nucleotide
  modified_base 89: mod_base = OTHER; note = 2'-O-methyl modified nucleotide
  modified_base 90: mod_base = OTHER; note = 2'-O-methyl modified nucleotide
  modified_base 91: mod_base = OTHER; note = 2'-O-methyl modified nucleotide
  modified_base 92: mod_base = OTHER; note = 2'-O-methyl modified nucleotide
  modified_base 93: mod_base = OTHER; note = 2'-O-methyl modified nucleotide
  modified_base 94: mod_base = OTHER; note = 2'-O-methyl modified nucleotide
  modified_base 95: mod_base = OTHER; note = 2'-O-methyl modified nucleotide
  modified_base 96: mod_base = OTHER; note = 2'-O-methyl modified nucleotide
  modified_base 120: mod_base = OTHER; note = Nucleotide with phosphorothioate linkage
  modified_base 121: mod_base = OTHER; note = 2'-O-methyl modified nucleotide with phosphorothioate linkage
  modified_base 122: mod_base = OTHER; note = 2'-O-methyl modified nucleotide with phosphorothioate linkage
  modified_base 123: mod_base = OTHER; note = 2'-O-methyl modified nucleotide
actcacgctggatagcctccgttttagagctagaaatagcaagttaaaataaggctagtccgttatcaacttgaaaaagtggcaccgagtcggtgctttctggcctggatgatggctatccag

SEQ ID NO: 17545 - RNA, 122 nt, synthetic construct
  source 1..122: mol_type = other RNA
  modified_base 1: mod_base = OTHER; note = 2'-O-methyl modified nucleotide with phosphorothioate linkage
  modified_base 2: mod_base = OTHER; note = 2'-O-methyl modified nucleotide with phosphorothioate linkage
  modified_base 3: mod_base = OTHER; note = 2'-O-methyl modified nucleotide with phosphorothioate linkage
  modified_base 29: mod_base = OTHER; note = 2'-O-methyl modified nucleotide
  modified_base 30: mod_base = OTHER; note = 2'-O-methyl modified nucleotide
  modified_base 31: mod_base = OTHER; note = 2'-O-methyl modified nucleotide
  modified_base 32: mod_base = OTHER; note = 2'-O-methyl modified nucleotide
  modified_base 33: mod_base = OTHER; note = 2'-O-methyl modified nucleotide
  modified_base 34: mod_base = OTHER; note = 2'-O-methyl modified nucleotide
  modified_base 35: mod_base = OTHER; note = 2'-O-methyl modified nucleotide
  modified_base 36: mod_base = OTHER; note = 2'-O-methyl modified nucleotide
  modified_base 37: mod_base = OTHER; note = 2'-O-methyl modified nucleotide
  modified_base 38: mod_base = OTHER; note = 2'-O-methyl modified nucleotide
  modified_base 39: mod_base = OTHER; note = 2'-O-methyl modified nucleotide
  modified_base 40: mod_base = OTHER; note = 2'-O-methyl modified nucleotide
  modified_base 69: mod_base = OTHER; note = 2'-O-methyl modified nucleotide
  modified_base 70: mod_base = OTHER; note = 2'-O-methyl modified nucleotide
  modified_base 71: mod_base = OTHER; note = 2'-O-methyl modified nucleotide
  modified_base 72: mod_base = OTHER; note = 2'-O-methyl modified nucleotide
  modified_base 73: mod_base = OTHER; note = 2'-O-methyl modified nucleotide
  modified_base 74: mod_base = OTHER; note = 2'-O-methyl modified nucleotide
  modified_base 75: mod_base = OTHER; note = 2'-O-methyl modified nucleotide
  modified_base 76: mod_base = OTHER; note = 2'-O-methyl modified nucleotide
  modified_base 77: mod_base = OTHER; note = 2'-O-methyl modified nucleotide
  modified_base 78: mod_base = OTHER; note = 2'-O-methyl modified nucleotide
  modified_base 79: mod_base = OTHER; note = 2'-O-methyl modified nucleotide
  modified_base 80: mod_base = OTHER; note = 2'-O-methyl modified nucleotide
  modified_base 81: mod_base = OTHER; note = 2'-O-methyl modified nucleotide
  modified_base 82: mod_base = OTHER; note = 2'-O-methyl modified nucleotide
  modified_base 83: mod_base = OTHER; note = 2'-O-methyl modified nucleotide
  modified_base 84: mod_base = OTHER; note = 2'-O-methyl modified nucleotide
  modified_base 85: mod_base = OTHER; note = 2'-O-methyl modified nucleotide
  modified_base 86: mod_base = OTHER; note = 2'-O-methyl modified nucleotide
  modified_base 87: mod_base = OTHER; note = 2'-O-methyl modified nucleotide
  modified_base 88: mod_base = OTHER; note = 2'-O-methyl modified nucleotide
  modified_base 89: mod_base = OTHER; note = 2'-O-methyl modified nucleotide
  modified_base 90: mod_base = OTHER; note = 2'-O-methyl modified nucleotide
  modified_base 91: mod_base = OTHER; note = 2'-O-methyl modified nucleotide
  modified_base 92: mod_base = OTHER; note = 2'-O-methyl modified nucleotide
  modified_base 93: mod_base = OTHER; note = 2'-O-methyl modified nucleotide
  modified_base 94: mod_base = OTHER; note = 2'-O-methyl modified nucleotide
  modified_base 95: mod_base = OTHER; note = 2'-O-methyl modified nucleotide
  modified_base 96: mod_base = OTHER; note = 2'-O-methyl modified nucleotide
  modified_base 119: mod_base = OTHER; note = Nucleotide with phosphorothioate linkage
  modified_base 120: mod_base = OTHER; note = 2'-O-methyl modified nucleotide with phosphorothioate linkage
  modified_base 121: mod_base = OTHER; note = 2'-O-methyl modified nucleotide with phosphorothioate linkage
  modified_base 122: mod_base = OTHER; note = 2'-O-methyl modified nucleotide
actcacgctggatagcctccgttttagagctagaaatagcaagttaaaataaggctagtccgttatcaacttgaaaaagtggcaccgagtcggtgctttctggcctggatgatggctatcca

SEQ ID NO: 17546 - RNA, 121 nt, synthetic construct
  source 1..121: mol_type = other RNA
  modified_base 1: mod_base = OTHER; note = 2'-O-methyl modified nucleotide with phosphorothioate linkage
  modified_base 2: mod_base = OTHER; note = 2'-O-methyl modified nucleotide with phosphorothioate linkage
  modified_base 3: mod_base = OTHER; note = 2'-O-methyl modified nucleotide with phosphorothioate linkage
  modified_base 29: mod_base = OTHER; note = 2'-O-methyl modified nucleotide
  modified_base 30: mod_base = OTHER; note = 2'-O-methyl modified nucleotide
  modified_base 31: mod_base = OTHER; note = 2'-O-methyl modified nucleotide
  modified_base 32: mod_base = OTHER; note = 2'-O-methyl modified nucleotide
  modified_base 33: mod_base = OTHER; note = 2'-O-methyl modified nucleotide
  modified_base 34: mod_base = OTHER; note = 2'-O-methyl modified nucleotide
  modified_base 35: mod_base = OTHER; note = 2'-O-methyl modified nucleotide
  modified_base 36: mod_base = OTHER; note = 2'-O-methyl modified nucleotide
  modified_base 37: mod_base = OTHER; note = 2'-O-methyl modified nucleotide
  modified_base 38: mod_base = OTHER; note = 2'-O-methyl modified nucleotide
  modified_base 39: mod_base = OTHER; note = 2'-O-methyl modified nucleotide
  modified_base 40: mod_base = OTHER; note = 2'-O-methyl modified nucleotide
  modified_base 69: mod_base = OTHER; note = 2'-O-methyl modified nucleotide
  modified_base 70: mod_base = OTHER; note = 2'-O-methyl modified nucleotide
  modified_base 71: mod_base = OTHER; note = 2'-O-methyl modified nucleotide
  modified_base 72: mod_base = OTHER; note = 2'-O-methyl modified nucleotide
  modified_base 73: mod_base = OTHER; note = 2'-O-methyl modified nucleotide
  modified_base 74: mod_base = OTHER; note = 2'-O-methyl modified nucleotide
  modified_base 75: mod_base = OTHER; note = 2'-O-methyl modified nucleotide
  modified_base 76: mod_base = OTHER; note = 2'-O-methyl modified nucleotide
  modified_base 77: mod_base = OTHER; note = 2'-O-methyl modified nucleotide
  modified_base 78: mod_base = OTHER; note = 2'-O-methyl modified nucleotide
  modified_base 79: mod_base = OTHER; note = 2'-O-methyl modified nucleotide
  modified_base 80: mod_base = OTHER; note = 2'-O-methyl modified nucleotide
  modified_base 81: mod_base = OTHER; note = 2'-O-methyl modified nucleotide
  modified_base 82: mod_base = OTHER; note = 2'-O-methyl modified nucleotide
  modified_base 83: mod_base = OTHER; note = 2'-O-methyl modified nucleotide
  modified_base 84: mod_base = OTHER; note = 2'-O-methyl modified nucleotide
  modified_base 85: mod_base = OTHER; note = 2'-O-methyl modified nucleotide
  modified_base 86: mod_base = OTHER; note = 2'-O-methyl modified nucleotide
  modified_base 87: mod_base = OTHER; note = 2'-O-methyl modified nucleotide
  modified_base 88: mod_base = OTHER; note = 2'-O-methyl modified nucleotide
  modified_base 89: mod_base = OTHER; note = 2'-O-methyl modified nucleotide
  modified_base 90: mod_base = OTHER; note = 2'-O-methyl modified nucleotide
  modified_base 91: mod_base = OTHER; note = 2'-O-methyl modified nucleotide
  modified_base 92: mod_base = OTHER; note = 2'-O-methyl modified nucleotide
  modified_base 93: mod_base = OTHER; note = 2'-O-methyl modified nucleotide
  modified_base 94: mod_base = OTHER; note = 2'-O-methyl modified nucleotide
  modified_base 95: mod_base = OTHER; note = 2'-O-methyl modified nucleotide
  modified_base 96: mod_base = OTHER; note = 2'-O-methyl modified nucleotide
  modified_base 118: mod_base = OTHER; note = Nucleotide with phosphorothioate linkage
  modified_base 119: mod_base = OTHER; note = 2'-O-methyl modified nucleotide with phosphorothioate linkage
  modified_base 120: mod_base = OTHER; note = 2'-O-methyl modified nucleotide with phosphorothioate linkage
  modified_base 121: mod_base = OTHER; note = 2'-O-methyl modified nucleotide
actcacgctggatagcctccgttttagagctagaaatagcaagttaaaataaggctagtccgttatcaacttgaaaaagtggcaccgagtcggtgctttctggcctggatgatggctatcc

SEQ ID NO: 17547 - RNA, 128 nt, synthetic construct
  source 1..128: mol_type = other RNA
  modified_base 1: mod_base = OTHER; note = 2'-O-methyl modified nucleotide with phosphorothioate linkage
  modified_base 2: mod_base = OTHER; note = 2'-O-methyl modified nucleotide with phosphorothioate linkage
  modified_base 3: mod_base = OTHER; note = 2'-O-methyl modified nucleotide with phosphorothioate linkage
  modified_base 29: mod_base = OTHER; note = 2'-O-methyl modified nucleotide
  modified_base 30: mod_base = OTHER; note = 2'-O-methyl modified nucleotide
  modified_base 31: mod_base = OTHER; note = 2'-O-methyl modified nucleotide
  modified_base 32: mod_base = OTHER; note = 2'-O-methyl modified nucleotide
  modified_base 33: mod_base = OTHER; note = 2'-O-methyl modified nucleotide
  modified_base 34: mod_base = OTHER; note = 2'-O-methyl modified nucleotide
  modified_base 35: mod_base = OTHER; note = 2'-O-methyl modified nucleotide
  modified_base 36: mod_base = OTHER; note = 2'-O-methyl modified nucleotide
  modified_base 37: mod_base = OTHER; note = 2'-O-methyl modified nucleotide
  modified_base 38: mod_base = OTHER; note = 2'-O-methyl modified nucleotide
  modified_base 39: mod_base = OTHER; note = 2'-O-methyl modified nucleotide
  modified_base 40: mod_base = OTHER; note = 2'-O-methyl modified nucleotide
  modified_base 69: mod_base = OTHER; note = 2'-O-methyl modified nucleotide
  modified_base 70: mod_base = OTHER; note = 2'-O-methyl modified nucleotide
  modified_base 71: mod_base = OTHER; note = 2'-O-methyl modified nucleotide
  modified_base 72: mod_base = OTHER; note = 2'-O-methyl modified nucleotide
  modified_base 73: mod_base = OTHER; note = 2'-O-methyl modified nucleotide
  modified_base 74: mod_base = OTHER; note = 2'-O-methyl modified nucleotide
  modified_base 75: mod_base = OTHER; note = 2'-O-methyl modified nucleotide
  modified_base 76: mod_base = OTHER; note = 2'-O-methyl modified nucleotide
  modified_base 77: mod_base = OTHER; note = 2'-O-methyl modified nucleotide
  modified_base 78: mod_base = OTHER; note = 2'-O-methyl modified nucleotide
  modified_base 79: mod_base = OTHER; note = 2'-O-methyl modified nucleotide
  modified_base 80: mod_base = OTHER; note = 2'-O-methyl modified nucleotide
  modified_base 81: mod_base = OTHER; note = 2'-O-methyl modified nucleotide
  modified_base 82: mod_base = OTHER; note = 2'-O-methyl modified nucleotide
  modified_base 83: mod_base = OTHER; note = 2'-O-methyl modified nucleotide
  modified_base 84: mod_base = OTHER; note = 2'-O-methyl modified nucleotide
  modified_base 85: mod_base = OTHER; note = 2'-O-methyl modified nucleotide
  modified_base 86: mod_base = OTHER; note = 2'-O-methyl modified nucleotide
  modified_base 87: mod_base = OTHER; note = 2'-O-methyl modified nucleotide
  modified_base 88: mod_base = OTHER; note = 2'-O-methyl modified nucleotide
  modified_base 89: mod_base = OTHER; note = 2'-O-methyl modified nucleotide
  modified_base 90: mod_base = OTHER; note = 2'-O-methyl modified nucleotide
  modified_base 91: mod_base = OTHER; note = 2'-O-methyl modified nucleotide
  modified_base 92: mod_base = OTHER; note = 2'-O-methyl modified nucleotide
  modified_base 93: mod_base = OTHER; note = 2'-O-methyl modified nucleotide
  modified_base 94: mod_base = OTHER; note = 2'-O-methyl modified nucleotide
  modified_base 95: mod_base = OTHER; note = 2'-O-methyl modified nucleotide
  modified_base 96: mod_base = OTHER; note = 2'-O-methyl modified nucleotide
  modified_base 125: mod_base = OTHER; note = Nucleotide with phosphorothioate linkage
  modified_base 126: mod_base = OTHER; note = 2'-O-methyl modified nucleotide with phosphorothioate linkage
  modified_base 127: mod_base = OTHER; note = 2'-O-methyl modified nucleotide with phosphorothioate linkage
  modified_base 128: mod_base = OTHER; note = 2'-O-methyl modified nucleotide
actcacgctggatagcctccgttttagagctagaaatagcaagttaaaataaggctagtccgttatcaacttgaaaaagtggcaccgagtcggtgctctttctggcctggatgatggctatccagcgt

SEQ ID NO: 17548 - RNA, 127 nt, synthetic construct
  source 1..127: mol_type = other RNA
  modified_base 1: mod_base = OTHER; note = 2'-O-methyl modified nucleotide with phosphorothioate linkage
  modified_base 2: mod_base = OTHER; note = 2'-O-methyl modified nucleotide with phosphorothioate linkage
  modified_base 3: mod_base = OTHER; note = 2'-O-methyl modified nucleotide with phosphorothioate linkage
  modified_base 29: mod_base = OTHER; note = 2'-O-methyl modified nucleotide
  modified_base 30: mod_base = OTHER; note = 2'-O-methyl modified nucleotide
  modified_base 31: mod_base = OTHER; note = 2'-O-methyl modified nucleotide
  modified_base 32: mod_base = OTHER; note = 2'-O-methyl modified nucleotide
  modified_base 33: mod_base = OTHER; note = 2'-O-methyl modified nucleotide
  modified_base 34: mod_base = OTHER; note = 2'-O-methyl modified nucleotide
  modified_base 35: mod_base = OTHER; note = 2'-O-methyl modified nucleotide
  modified_base 36: mod_base = OTHER; note = 2'-O-methyl modified nucleotide
  modified_base 37: mod_base = OTHER; note = 2'-O-methyl modified nucleotide
  modified_base 38: mod_base = OTHER; note = 2'-O-methyl modified nucleotide
  modified_base 39: mod_base = OTHER; note = 2'-O-methyl modified nucleotide
  modified_base 40: mod_base = OTHER; note = 2'-O-methyl modified nucleotide
  modified_base 69: mod_base = OTHER; note = 2'-O-methyl modified nucleotide
  modified_base 70: mod_base = OTHER; note = 2'-O-methyl modified nucleotide
  modified_base 71: mod_base = OTHER; note = 2'-O-methyl modified nucleotide
  modified_base 72: mod_base = OTHER; note = 2'-O-methyl modified nucleotide
  modified_base 73: mod_base = OTHER; note = 2'-O-methyl modified nucleotide
  modified_base 74: mod_base = OTHER; note = 2'-O-methyl modified nucleotide
  modified_base 75: mod_base = OTHER; note = 2'-O-methyl modified nucleotide
  modified_base 76: mod_base = OTHER; note = 2'-O-methyl modified nucleotide
  modified_base 77: mod_base = OTHER; note = 2'-O-methyl modified nucleotide
  modified_base 78: mod_base = OTHER; note = 2'-O-methyl modified nucleotide
  modified_base 79: mod_base = OTHER; note = 2'-O-methyl modified nucleotide
  modified_base 80: mod_base = OTHER; note = 2'-O-methyl modified nucleotide
  modified_base 81: mod_base = OTHER; note = 2'-O-methyl modified nucleotide
  modified_base 82: mod_base = OTHER; note = 2'-O-methyl modified nucleotide
  modified_base 83: mod_base = OTHER; note = 2'-O-methyl modified nucleotide
  modified_base 84: mod_base = OTHER; note = 2'-O-methyl modified nucleotide
  modified_base 85: mod_base = OTHER; note = 2'-O-methyl modified nucleotide
  modified_base 86: mod_base = OTHER; note = 2'-O-methyl modified nucleotide
  modified_base 87: mod_base = OTHER; note = 2'-O-methyl modified nucleotide
  modified_base 88: mod_base = OTHER; note = 2'-O-methyl modified nucleotide
  modified_base 89: mod_base = OTHER; note = 2'-O-methyl modified nucleotide
  modified_base 90: mod_base = OTHER; note = 2'-O-methyl modified nucleotide
  modified_base 91: mod_base = OTHER; note = 2'-O-methyl modified nucleotide
  modified_base 92: mod_base = OTHER; note = 2'-O-methyl modified nucleotide
  modified_base 93: mod_base = OTHER; note = 2'-O-methyl modified nucleotide
  modified_base 94: mod_base = OTHER; note = 2'-O-methyl modified nucleotide
  modified_base 95: mod_base = OTHER; note = 2'-O-methyl modified nucleotide
  modified_base 96: mod_base = OTHER; note = 2'-O-methyl modified nucleotide
  modified_base 124: mod_base = OTHER; note = Nucleotide with phosphorothioate linkage
  modified_base 125: mod_base = OTHER; note = 2'-O-methyl modified nucleotide with phosphorothioate linkage
  modified_base 126: mod_base = OTHER; note = 2'-O-methyl modified nucleotide with phosphorothioate linkage
  modified_base 127: mod_base = OTHER; note = 2'-O-methyl modified nucleotide
actcacgctggatagcctccgttttagagctagaaatagcaagttaaaataaggctagtccgttatcaacttgaaaaagtggcaccgagtcggtgctctttctggcctggatgatggctatccagcg

SEQ ID NO: 17549 - RNA, 126 nt, synthetic construct
  source 1..126: mol_type = other RNA
  modified_base 1: mod_base = OTHER; note = 2'-O-methyl modified nucleotide with phosphorothioate linkage
  modified_base 2: mod_base = OTHER; note = 2'-O-methyl modified nucleotide with phosphorothioate linkage
  modified_base 3: mod_base = OTHER; note = 2'-O-methyl modified nucleotide with phosphorothioate linkage
  modified_base 29: mod_base = OTHER; note = 2'-O-methyl modified nucleotide
  modified_base 30: mod_base = OTHER; note = 2'-O-methyl modified nucleotide
  modified_base 31: mod_base = OTHER; note = 2'-O-methyl modified nucleotide
  modified_base 32: mod_base = OTHER; note = 2'-O-methyl modified nucleotide
  modified_base 33: mod_base = OTHER; note = 2'-O-methyl modified nucleotide
  modified_base 34: mod_base = OTHER; note = 2'-O-methyl modified nucleotide
  modified_base 35: mod_base = OTHER; note = 2'-O-methyl modified nucleotide
  modified_base 36: mod_base = OTHER; note = 2'-O-methyl modified nucleotide
  modified_base 37: mod_base = OTHER; note = 2'-O-methyl modified nucleotide
  modified_base 38: mod_base = OTHER; note = 2'-O-methyl modified nucleotide
  modified_base 39: mod_base = OTHER; note = 2'-O-methyl modified nucleotide
  modified_base 40: mod_base = OTHER; note = 2'-O-methyl modified nucleotide
  modified_base 69: mod_base = OTHER; note = 2'-O-methyl modified nucleotide
  modified_base 70: mod_base = OTHER; note = 2'-O-methyl modified nucleotide
  modified_base 71: mod_base = OTHER; note = 2'-O-methyl modified nucleotide
  modified_base 72: mod_base = OTHER; note = 2'-O-methyl modified nucleotide
  modified_base 73: mod_base = OTHER; note = 2'-O-methyl modified nucleotide
  modified_base 74: mod_base = OTHER; note = 2'-O-methyl modified nucleotide
  modified_base 75: mod_base = OTHER; note = 2'-O-methyl modified nucleotide
  modified_base 76: mod_base = OTHER; note = 2'-O-methyl modified nucleotide
  modified_base 77: mod_base = OTHER; note = 2'-O-methyl modified nucleotide
  modified_base 78: mod_base = OTHER; note = 2'-O-methyl modified nucleotide
  modified_base 79: mod_base = OTHER; note = 2'-O-methyl modified nucleotide
  modified_base 80: mod_base = OTHER; note = 2'-O-methyl modified nucleotide
  modified_base 81: mod_base = OTHER; note = 2'-O-methyl modified nucleotide
  modified_base 82: mod_base = OTHER; note = 2'-O-methyl modified nucleotide
  modified_base 83: mod_base = OTHER; note = 2'-O-methyl modified nucleotide
  modified_base 84: mod_base = OTHER; note = 2'-O-methyl modified nucleotide
  modified_base 85: mod_base = OTHER; note = 2'-O-methyl modified nucleotide
  modified_base 86: mod_base = OTHER; note = 2'-O-methyl modified nucleotide
  modified_base 87: mod_base = OTHER; note = 2'-O-methyl modified nucleotide
  modified_base 88: mod_base = OTHER; note = 2'-O-methyl modified nucleotide
  modified_base 89: mod_base = OTHER; note = 2'-O-methyl modified nucleotide
  modified_base 90: mod_base = OTHER; note = 2'-O-methyl modified nucleotide
  modified_base 91: mod_base = OTHER; note = 2'-O-methyl modified nucleotide
  modified_base 92: mod_base = OTHER; note = 2'-O-methyl modified nucleotide
  modified_base 93: mod_base = OTHER; note = 2'-O-methyl modified nucleotide
  modified_base 94: mod_base = OTHER; note = 2'-O-methyl modified nucleotide
  modified_base 95: mod_base = OTHER; note = 2'-O-methyl modified nucleotide
  modified_base 96: mod_base = OTHER; note = 2'-O-methyl modified nucleotide
  modified_base 123: mod_base = OTHER; note = Nucleotide with phosphorothioate linkage
  modified_base 124: mod_base = OTHER; note = 2'-O-methyl modified nucleotide with phosphorothioate linkage
  modified_base 125: mod_base = OTHER; note = 2'-O-methyl modified nucleotide with phosphorothioate linkage
  modified_base 126: mod_base = OTHER; note = 2'-O-methyl modified nucleotide
actcacgctggatagcctccgttttagagctagaaatagcaagttaaaataaggctagtccgttatcaacttgaaaaagtggcaccgagtcggtgctctttctggcctggatgatggctatccagc

SEQ ID NO: 17550 - RNA, 125 nt, synthetic construct
  source 1..125: mol_type = other RNA
  modified_base 1: mod_base = OTHER; note = 2'-O-methyl modified nucleotide with phosphorothioate linkage
  modified_base 2: mod_base = OTHER; note = 2'-O-methyl modified nucleotide with phosphorothioate linkage
  modified_base 3: mod_base = OTHER; note = 2'-O-methyl modified nucleotide with phosphorothioate linkage
  modified_base 29: mod_base = OTHER; note = 2'-O-methyl modified nucleotide
  modified_base 30: mod_base = OTHER; note = 2'-O-methyl modified nucleotide
  modified_base 31: mod_base = OTHER; note = 2'-O-methyl modified nucleotide
  modified_base 32: mod_base = OTHER; note = 2'-O-methyl modified nucleotide
  modified_base 33: mod_base = OTHER; note = 2'-O-methyl modified nucleotide
  modified_base 34: mod_base = OTHER; note = 2'-O-methyl modified nucleotide
  modified_base 35: mod_base = OTHER; note = 2'-O-methyl modified nucleotide
  modified_base 36: mod_base = OTHER; note = 2'-O-methyl modified nucleotide
  modified_base 37: mod_base = OTHER; note = 2'-O-methyl modified nucleotide
  modified_base 38: mod_base = OTHER; note = 2'-O-methyl modified nucleotide
  modified_base 39: mod_base = OTHER; note = 2'-O-methyl modified nucleotide
  modified_base 40: mod_base = OTHER; note = 2'-O-methyl modified nucleotide
  modified_base 69: mod_base = OTHER; note = 2'-O-methyl modified nucleotide
  modified_base 70: mod_base = OTHER; note = 2'-O-methyl modified nucleotide
  modified_base 71: mod_base = OTHER; note = 2'-O-methyl modified nucleotide
  modified_base 72: mod_base = OTHER; note = 2'-O-methyl modified nucleotide
  modified_base 73: mod_base = OTHER; note = 2'-O-methyl modified nucleotide
  modified_base 74: mod_base = OTHER; note = 2'-O-methyl modified nucleotide
  modified_base 75: mod_base = OTHER; note = 2'-O-methyl modified nucleotide
  modified_base 76: mod_base = OTHER; note = 2'-O-methyl modified nucleotide
  modified_base 77: mod_base = OTHER; note = 2'-O-methyl modified nucleotide
  modified_base 78: mod_base = OTHER; note = 2'-O-methyl modified nucleotide
  modified_base 79: mod_base = OTHER; note = 2'-O-methyl modified nucleotide
  modified_base 80: mod_base = OTHER; note = 2'-O-methyl modified nucleotide
  modified_base 81: mod_base = OTHER; note = 2'-O-methyl modified nucleotide
  modified_base 82: mod_base = OTHER; note = 2'-O-methyl modified nucleotide
  modified_base 83: mod_base = OTHER; note = 2'-O-methyl modified nucleotide
  modified_base 84: mod_base = OTHER; note = 2'-O-methyl modified nucleotide
  modified_base 85: mod_base = OTHER; note = 2'-O-methyl modified nucleotide
  modified_base 86: mod_base = OTHER; note = 2'-O-methyl modified nucleotide
  modified_base 87: mod_base = OTHER; note = 2'-O-methyl modified nucleotide
  modified_base 88: mod_base = OTHER; note = 2'-O-methyl modified nucleotide
  modified_base 89: mod_base = OTHER; note = 2'-O-methyl modified nucleotide
  modified_base 90: mod_base = OTHER; note = 2'-O-methyl modified nucleotide
  modified_base 91: mod_base = OTHER; note = 2'-O-methyl modified nucleotide
  modified_base 92: mod_base = OTHER; note = 2'-O-methyl modified nucleotide
  modified_base 93: mod_base = OTHER; note = 2'-O-methyl modified nucleotide
  modified_base 94: mod_base = OTHER; note = 2'-O-methyl modified nucleotide
  modified_base 95: mod_base = OTHER; note = 2'-O-methyl modified nucleotide
  modified_base 96: mod_base = OTHER; note = 2'-O-methyl modified nucleotide
  modified_base 122: mod_base = OTHER; note = Nucleotide with phosphorothioate linkage
  modified_base 123: mod_base = OTHER; note = 2'-O-methyl modified nucleotide with phosphorothioate linkage
  modified_base 124: mod_base = OTHER; note = 2'-O-methyl modified nucleotide with phosphorothioate linkage
  modified_base 125: mod_base = OTHER; note = 2'-O-methyl modified nucleotide
actcacgctggatagcctccgttttagagctagaaatagcaagttaaaataaggctagtccgttatcaacttgaaaaagtggcaccgagtcggtgctctttctggcctggatgatggctatccag

SEQ ID NO: 17551 - RNA, 124 nt, synthetic construct
  source 1..124: mol_type = other RNA
  modified_base 1: mod_base = OTHER; note = 2'-O-methyl modified nucleotide with phosphorothioate linkage
  modified_base 2: mod_base = OTHER; note = 2'-O-methyl modified nucleotide with phosphorothioate linkage
  modified_base 3: mod_base = OTHER; note = 2'-O-methyl modified nucleotide with phosphorothioate linkage
  modified_base 29: mod_base = OTHER; note = 2'-O-methyl modified nucleotide
  modified_base 30: mod_base = OTHER; note = 2'-O-methyl modified nucleotide
  modified_base 31: mod_base = OTHER; note = 2'-O-methyl modified nucleotide
  modified_base 32: mod_base = OTHER; note = 2'-O-methyl modified nucleotide
  modified_base 33: mod_base = OTHER; note = 2'-O-methyl modified nucleotide
  modified_base 34: mod_base = OTHER; note = 2'-O-methyl modified nucleotide
  modified_base 35: mod_base = OTHER; note = 2'-O-methyl modified nucleotide
  modified_base 36: mod_base = OTHER; note = 2'-O-methyl modified nucleotide
  modified_base 37: mod_base = OTHER; note = 2'-O-methyl modified nucleotide
  modified_base 38: mod_base = OTHER; note = 2'-O-methyl modified nucleotide
  modified_base 39: mod_base = OTHER; note = 2'-O-methyl modified nucleotide
  modified_base 40: mod_base = OTHER; note = 2'-O-methyl modified nucleotide
  modified_base 69: mod_base = OTHER; note = 2'-O-methyl modified nucleotide
  modified_base 70: mod_base = OTHER; note = 2'-O-methyl modified nucleotide
  modified_base 71: mod_base = OTHER; note = 2'-O-methyl modified nucleotide
  modified_base 72: mod_base = OTHER; note = 2'-O-methyl modified nucleotide
  modified_base 73: mod_base = OTHER; note = 2'-O-methyl modified nucleotide
  modified_base 74: mod_base = OTHER; note = 2'-O-methyl modified nucleotide
  modified_base 75: mod_base = OTHER; note = 2'-O-methyl modified nucleotide
  modified_base 76: mod_base = OTHER; note = 2'-O-methyl modified nucleotide
  modified_base 77: mod_base = OTHER; note = 2'-O-methyl modified nucleotide
  modified_base 78: mod_base = OTHER; note = 2'-O-methyl modified nucleotide
  modified_base 79: mod_base = OTHER; note = 2'-O-methyl modified nucleotide
  modified_base 80: mod_base = OTHER; note = 2'-O-methyl modified nucleotide
  modified_base 81: mod_base = OTHER; note = 2'-O-methyl modified nucleotide
  modified_base 82: mod_base = OTHER; note = 2'-O-methyl modified nucleotide
  modified_base 83: mod_base = OTHER; note = 2'-O-methyl modified nucleotide
  modified_base 84: mod_base = OTHER; note = 2'-O-methyl modified nucleotide
  modified_base 85: mod_base = OTHER; note = 2'-O-methyl modified nucleotide
  modified_base 86: mod_base = OTHER; note = 2'-O-methyl modified nucleotide
  modified_base 87: mod_base = OTHER; note = 2'-O-methyl modified nucleotide
  modified_base 88: mod_base = OTHER; note = 2'-O-methyl modified nucleotide
  modified_base 89: mod_base = OTHER; note = 2'-O-methyl modified nucleotide
  modified_base 90: mod_base = OTHER; note = 2'-O-methyl modified nucleotide
  modified_base 91: mod_base = OTHER; note = 2'-O-methyl modified nucleotide
  modified_base 92: mod_base = OTHER; note = 2'-O-methyl modified nucleotide
  modified_base 93: mod_base = OTHER; note = 2'-O-methyl modified nucleotide
  modified_base 94: mod_base = OTHER; note = 2'-O-methyl modified nucleotide
  modified_base 95: mod_base = OTHER; note = 2'-O-methyl modified nucleotide
  modified_base 96: mod_base = OTHER; note = 2'-O-methyl modified nucleotide
  modified_base 121: mod_base = OTHER; note = Nucleotide with phosphorothioate linkage
  modified_base 122: mod_base = OTHER; note = 2'-O-methyl modified nucleotide with phosphorothioate linkage
  modified_base 123: mod_base = OTHER; note = 2'-O-methyl modified nucleotide with phosphorothioate linkage
  modified_base 124: mod_base = OTHER; note = 2'-O-methyl modified nucleotide
actcacgctggatagcctccgttttagagctagaaatagcaagttaaaataaggctagtccgttatcaacttgaaaaagtggcaccgagtcggtgctctttctggcctggatgatggctatcca

SEQ ID NO: 17552 - RNA, 123 nt, synthetic construct
  source 1..123: mol_type = other RNA
  modified_base 1: mod_base = OTHER; note = 2'-O-methyl modified nucleotide with phosphorothioate linkage
  modified_base 2: mod_base = OTHER; note = 2'-O-methyl modified nucleotide with phosphorothioate linkage
  modified_base 3: mod_base = OTHER; note = 2'-O-methyl modified nucleotide with phosphorothioate linkage
  modified_base 29: mod_base = OTHER; note = 2'-O-methyl modified nucleotide
  modified_base 30: mod_base = OTHER; note = 2'-O-methyl modified nucleotide
  modified_base 31: mod_base = OTHER; note = 2'-O-methyl modified nucleotide
  modified_base 32: mod_base = OTHER; note = 2'-O-methyl modified nucleotide
  modified_base 33: mod_base = OTHER; note = 2'-O-methyl modified nucleotide
  modified_base 34: mod_base = OTHER; note = 2'-O-methyl modified nucleotide
  modified_base 35: mod_base = OTHER; note = 2'-O-methyl modified nucleotide
  modified_base 36: mod_base = OTHER; note = 2'-O-methyl modified nucleotide
  modified_base 37: mod_base = OTHER; note = 2'-O-methyl modified nucleotide
  modified_base 38: mod_base = OTHER; note = 2'-O-methyl modified nucleotide
  modified_base 39: mod_base = OTHER; note = 2'-O-methyl modified nucleotide
  modified_base 40: mod_base = OTHER; note = 2'-O-methyl modified nucleotide
  modified_base 69: mod_base = OTHER; note = 2'-O-methyl modified nucleotide
  modified_base 70: mod_base = OTHER; note = 2'-O-methyl modified nucleotide
  modified_base 71: mod_base = OTHER; note = 2'-O-methyl modified nucleotide
  modified_base 72: mod_base = OTHER; note = 2'-O-methyl modified nucleotide
  modified_base 73: mod_base = OTHER; note = 2'-O-methyl modified nucleotide
  modified_base 74: mod_base = OTHER; note = 2'-O-methyl modified nucleotide
  modified_base 75: mod_base = OTHER; note = 2'-O-methyl modified nucleotide
  modified_base 76: mod_base = OTHER; note = 2'-O-methyl modified nucleotide
  modified_base 77: mod_base = OTHER; note = 2'-O-methyl modified nucleotide
  modified_base 78: mod_base = OTHER; note = 2'-O-methyl modified nucleotide
  modified_base 79: mod_base = OTHER; note = 2'-O-methyl modified nucleotide
  modified_base 80: mod_base = OTHER; note = 2'-O-methyl modified nucleotide
  modified_base 81: mod_base = OTHER; note = 2'-O-methyl modified nucleotide
  modified_base 82: mod_base = OTHER; note = 2'-O-methyl modified nucleotide
  modified_base 83: mod_base = OTHER; note = 2'-O-methyl modified nucleotide
  modified_base 84: mod_base = OTHER; note = 2'-O-methyl modified nucleotide
  modified_base 85: mod_base = OTHER; note = 2'-O-methyl modified nucleotide
  modified_base 86: mod_base = OTHER; note = 2'-O-methyl modified nucleotide
  modified_base 87: mod_base = OTHER; note = 2'-O-methyl modified nucleotide
  modified_base 88: mod_base = OTHER; note = 2'-O-methyl modified nucleotide
  modified_base 89: mod_base = OTHER; note = 2'-O-methyl modified nucleotide
  modified_base 90: mod_base = OTHER; note = 2'-O-methyl modified nucleotide
  modified_base 91: mod_base = OTHER; note = 2'-O-methyl modified nucleotide
  modified_base 92: mod_base = OTHER; note = 2'-O-methyl modified nucleotide
  modified_base 93: mod_base = OTHER; note = 2'-O-methyl modified nucleotide
  modified_base 94: mod_base = OTHER; note = 2'-O-methyl modified nucleotide
  modified_base 95: mod_base = OTHER; note = 2'-O-methyl modified nucleotide
  modified_base 96: mod_base = OTHER; note = 2'-O-methyl modified nucleotide
  modified_base 120: mod_base = OTHER; note = Nucleotide with phosphorothioate linkage
  modified_base 121: mod_base = OTHER; note = 2'-O-methyl modified nucleotide with phosphorothioate linkage
  modified_base 122: mod_base = OTHER; note = 2'-O-methyl modified nucleotide with phosphorothioate linkage
  modified_base 123: mod_base = OTHER; note = 2'-O-methyl modified nucleotide
actcacgctggatagcctccgttttagagctagaaatagcaagttaaaataaggctagtccgttatcaacttgaaaaagtggcaccgagtcggtgctctttctggcctggatgatggctatcc

SEQ ID NO: 17553 - RNA, 130 nt, synthetic construct
  source 1..130: mol_type = other RNA
  modified_base 1: mod_base = OTHER; note = 2'-O-methyl modified nucleotide with phosphorothioate linkage
  modified_base 2: mod_base = OTHER; note = 2'-O-methyl modified nucleotide with phosphorothioate linkage
  modified_base 3: mod_base = OTHER; note = 2'-O-methyl modified nucleotide with phosphorothioate linkage
  modified_base 29: mod_base = OTHER; note = 2'-O-methyl modified nucleotide
  modified_base 30: mod_base = OTHER; note = 2'-O-methyl modified nucleotide
  modified_base 31: mod_base = OTHER; note = 2'-O-methyl modified nucleotide
  modified_base 32: mod_base = OTHER; note = 2'-O-methyl modified nucleotide
  modified_base 33: mod_base = OTHER; note = 2'-O-methyl modified nucleotide
  modified_base 34: mod_base = OTHER; note = 2'-O-methyl modified nucleotide
  modified_base 35: mod_base = OTHER; note = 2'-O-methyl modified nucleotide
  modified_base 36: mod_base = OTHER; note = 2'-O-methyl modified nucleotide
  modified_base 37: mod_base = OTHER; note = 2'-O-methyl modified nucleotide
  modified_base 38: mod_base = OTHER; note = 2'-O-methyl modified nucleotide
  modified_base 39: mod_base = OTHER; note = 2'-O-methyl modified nucleotide
  modified_base 40: mod_base = OTHER; note = 2'-O-methyl modified nucleotide
  modified_base 69: mod_base = OTHER; note = 2'-O-methyl modified nucleotide
  modified_base 70: mod_base = OTHER; note = 2'-O-methyl modified nucleotide
  modified_base 71: mod_base = OTHER; note = 2'-O-methyl modified nucleotide
  modified_base 72: mod_base = OTHER; note = 2'-O-methyl modified nucleotide
  modified_base 73: mod_base = OTHER; note = 2'-O-methyl modified nucleotide
  modified_base 74: mod_base = OTHER; note = 2'-O-methyl modified nucleotide
  modified_base 75: mod_base = OTHER; note = 2'-O-methyl modified nucleotide
  modified_base 76: mod_base = OTHER; note = 2'-O-methyl modified nucleotide
  modified_base 77: mod_base = OTHER; note = 2'-O-methyl modified nucleotide
  modified_base 78: mod_base = OTHER; note = 2'-O-methyl modified nucleotide
  modified_base 79: mod_base = OTHER; note = 2'-O-methyl modified nucleotide
  modified_base 80: mod_base = OTHER; note = 2'-O-methyl modified nucleotide
  modified_base 81: mod_base = OTHER; note = 2'-O-methyl modified nucleotide
  modified_base 82: mod_base = OTHER; note = 2'-O-methyl modified nucleotide
  modified_base 83: mod_base = OTHER; note = 2'-O-methyl modified nucleotide
  modified_base 84: mod_base = OTHER; note = 2'-O-methyl modified nucleotide
  modified_base 85: mod_base = OTHER; note = 2'-O-methyl modified nucleotide
  modified_base 86: mod_base = OTHER; note = 2'-O-methyl modified nucleotide
  modified_base 87: mod_base = OTHER; note = 2'-O-methyl modified nucleotide
  modified_base 88: mod_base = OTHER; note = 2'-O-methyl modified nucleotide
  modified_base 89: mod_base = OTHER; note = 2'-O-methyl modified nucleotide
  modified_base 90: mod_base = OTHER; note = 2'-O-methyl modified nucleotide
  modified_base 91: mod_base = OTHER; note = 2'-O-methyl modified nucleotide
  modified_base 92: mod_base = OTHER; note = 2'-O-methyl modified nucleotide
  modified_base 93: mod_base = OTHER; note = 2'-O-methyl modified nucleotide
  modified_base 94: mod_base = OTHER; note = 2'-O-methyl modified nucleotide
  modified_base 95: mod_base = OTHER; note = 2'-O-methyl modified nucleotide
  modified_base 96: mod_base = OTHER; note = 2'-O-methyl modified nucleotide
  modified_base 127: mod_base = OTHER; note = Nucleotide with phosphorothioate linkage
  modified_base 128: mod_base = OTHER; note = 2'-O-methyl modified nucleotide with phosphorothioate linkage
  modified_base 129: mod_base = OTHER; note = 2'-O-methyl modified nucleotide with phosphorothioate linkage
  modified_base 130: mod_base = OTHER; note = 2'-O-methyl modified nucleotide
actcacgctggatagcctccgttttagagctagaaatagcaagttaaaataaggctagtccgttatcaacttgaaaaagtggcaccgagtcggtgctctctttctggcctggatgatggctatccagcgt

SEQ ID NO: 17554 - RNA, 129 nt, synthetic construct
  source 1..129: mol_type = other RNA
  modified_base 1: mod_base = OTHER; note = 2'-O-methyl modified nucleotide with phosphorothioate linkage
  modified_base 2: mod_base = OTHER; note = 2'-O-methyl modified nucleotide with phosphorothioate linkage
  modified_base 3: mod_base = OTHER; note = 2'-O-methyl modified nucleotide with phosphorothioate linkage
  modified_base 29: mod_base = OTHER; note = 2'-O-methyl modified nucleotide
  modified_base 30: mod_base = OTHER; note = 2'-O-methyl modified nucleotide
  modified_base 31: mod_base = OTHER; note = 2'-O-methyl modified nucleotide
  modified_base 32: mod_base = OTHER; note = 2'-O-methyl modified nucleotide
  modified_base 33: mod_base = OTHER; note = 2'-O-methyl modified nucleotide
  modified_base 34: mod_base = OTHER; note = 2'-O-methyl modified nucleotide
  modified_base 35: mod_base = OTHER; note = 2'-O-methyl modified nucleotide
  modified_base 36: mod_base = OTHER; note = 2'-O-methyl modified nucleotide
  modified_base 37: mod_base = OTHER; note = 2'-O-methyl modified nucleotide
  modified_base 38: mod_base = OTHER; note = 2'-O-methyl modified nucleotide
  modified_base 39: mod_base = OTHER; note = 2'-O-methyl modified nucleotide
  modified_base 40: mod_base = OTHER; note = 2'-O-methyl modified nucleotide
  modified_base 69: mod_base = OTHER; note = 2'-O-methyl modified nucleotide
  modified_base 70: mod_base = OTHER; note = 2'-O-methyl modified nucleotide
  modified_base 71: mod_base = OTHER; note = 2'-O-methyl modified nucleotide
  modified_base 72: mod_base = OTHER; note = 2'-O-methyl modified nucleotide
  modified_base 73: mod_base = OTHER; note = 2'-O-methyl modified nucleotide
  modified_base 74: mod_base = OTHER; note = 2'-O-methyl modified nucleotide
  modified_base 75: mod_base = OTHER; note = 2'-O-methyl modified nucleotide
  modified_base 76: mod_base = OTHER; note = 2'-O-methyl modified nucleotide
  modified_base 77: mod_base = OTHER; note = 2'-O-methyl modified nucleotide
  modified_base 78: mod_base = OTHER; note = 2'-O-methyl modified nucleotide
  modified_base 79: mod_base = OTHER; note = 2'-O-methyl modified nucleotide
  modified_base 80: mod_base = OTHER; note = 2'-O-methyl modified nucleotide
  modified_base 81: mod_base = OTHER; note = 2'-O-methyl modified nucleotide
  modified_base 82: mod_base = OTHER; note = 2'-O-methyl modified nucleotide
  modified_base 83: mod_base = OTHER; note = 2'-O-methyl modified nucleotide
  modified_base 84: mod_base = OTHER; note = 2'-O-methyl modified nucleotide
  modified_base 85: mod_base = OTHER; note = 2'-O-methyl modified nucleotide
  modified_base 86: mod_base = OTHER; note = 2'-O-methyl modified nucleotide
  modified_base 87: mod_base = OTHER; note = 2'-O-methyl modified nucleotide
  modified_base 88: mod_base = OTHER; note = 2'-O-methyl modified nucleotide
  modified_base 89: mod_base = OTHER; note = 2'-O-methyl modified nucleotide
  modified_base 90: mod_base = OTHER; note = 2'-O-methyl modified nucleotide
  modified_base 91: mod_base = OTHER; note = 2'-O-methyl modified nucleotide
  modified_base 92: mod_base = OTHER; note = 2'-O-methyl modified nucleotide
  modified_base 93: mod_base = OTHER; note = 2'-O-methyl modified nucleotide
  modified_base 94: mod_base = OTHER; note = 2'-O-methyl modified nucleotide
  modified_base 95: mod_base = OTHER; note = 2'-O-methyl modified nucleotide
  modified_base 96: mod_base = OTHER; note = 2'-O-methyl modified nucleotide
  modified_base 126: mod_base = OTHER; note = Nucleotide with phosphorothioate linkage
  modified_base 127: mod_base = OTHER; note = 2'-O-methyl modified nucleotide with phosphorothioate linkage
  modified_base 128: mod_base = OTHER; note = 2'-O-methyl modified nucleotide with phosphorothioate linkage
  modified_base 129: mod_base = OTHER; note = 2'-O-methyl modified nucleotide
actcacgctggatagcctccgttttagagctagaaatagcaagttaaaataaggctagtccgttatcaacttgaaaaagtggcaccgagtcggtgctctctttctggcctggatgatggctatccagcg

SEQ ID NO: 17555 - RNA, 128 nt, synthetic construct
  source 1..128: mol_type = other RNA
  modified_base 1: mod_base = OTHER; note = 2'-O-methyl modified nucleotide with phosphorothioate linkage
  modified_base 2: mod_base = OTHER; note = 2'-O-methyl modified nucleotide with phosphorothioate linkage
  modified_base 3: mod_base = OTHER; note = 2'-O-methyl modified nucleotide with phosphorothioate linkage
  modified_base 29: mod_base = OTHER; note = 2'-O-methyl modified nucleotide
  modified_base 30: mod_base = OTHER; note = 2'-O-methyl modified nucleotide
  modified_base 31: mod_base = OTHER; note = 2'-O-methyl modified nucleotide
  modified_base 32: mod_base = OTHER; note = 2'-O-methyl modified nucleotide
  modified_base 33: mod_base = OTHER; note = 2'-O-methyl modified nucleotide
  modified_base 34: mod_base = OTHER; note = 2'-O-methyl modified nucleotide
  modified_base 35: mod_base = OTHER; note = 2'-O-methyl modified nucleotide
  modified_base 36: mod_base = OTHER; note = 2'-O-methyl modified nucleotide
  modified_base 37: mod_base = OTHER; note = 2'-O-methyl modified nucleotide
  modified_base 38: mod_base = OTHER; note = 2'-O-methyl modified nucleotide
  modified_base 39: mod_base = OTHER; note = 2'-O-methyl modified nucleotide
  modified_base 40: mod_base = OTHER; note = 2'-O-methyl modified nucleotide
  modified_base 69: mod_base = OTHER; note = 2'-O-methyl modified nucleotide
  modified_base 70: mod_base = OTHER; note = 2'-O-methyl modified nucleotide
  modified_base 71: mod_base = OTHER; note = 2'-O-methyl modified nucleotide
  modified_base 72: mod_base = OTHER; note = 2'-O-methyl modified nucleotide
  modified_base 73: mod_base = OTHER; note = 2'-O-methyl modified nucleotide
  modified_base 74: mod_base = OTHER; note = 2'-O-methyl modified nucleotide
  modified_base 75: mod_base = OTHER; note = 2'-O-methyl modified nucleotide
  modified_base 76: mod_base = OTHER; note = 2'-O-methyl modified nucleotide
  modified_base 77: mod_base = OTHER; note = 2'-O-methyl modified nucleotide
  modified_base 78: mod_base = OTHER; note = 2'-O-methyl modified nucleotide
  modified_base 79: mod_base = OTHER; note = 2'-O-methyl modified nucleotide
  modified_base 80: mod_base = OTHER; note = 2'-O-methyl modified nucleotide
  modified_base 81: mod_base = OTHER; note = 2'-O-methyl modified nucleotide
  modified_base 82: mod_base = OTHER; note = 2'-O-methyl modified nucleotide
  modified_base 83: mod_base = OTHER; note = 2'-O-methyl modified nucleotide
  modified_base 84: mod_base = OTHER; note = 2'-O-methyl modified nucleotide
  modified_base 85: mod_base = OTHER; note = 2'-O-methyl modified nucleotide
  modified_base 86: mod_base = OTHER; note = 2'-O-methyl modified nucleotide
  modified_base 87: mod_base = OTHER; note = 2'-O-methyl modified nucleotide
  modified_base 88: mod_base = OTHER; note = 2'-O-methyl modified nucleotide
  modified_base 89: mod_base = OTHER; note = 2'-O-methyl modified nucleotide
  modified_base 90: mod_base = OTHER; note = 2'-O-methyl modified nucleotide
  modified_base 91: mod_base = OTHER; note = 2'-O-methyl modified nucleotide
  modified_base 92: mod_base = OTHER; note = 2'-O-methyl modified nucleotide
  modified_base 93: mod_base = OTHER; note = 2'-O-methyl modified nucleotide
  modified_base 94: mod_base = OTHER; note = 2'-O-methyl modified nucleotide
  modified_base 95: mod_base = OTHER; note = 2'-O-methyl modified nucleotide
  modified_base 96: mod_base = OTHER; note = 2'-O-methyl modified nucleotide
  modified_base 125: mod_base = OTHER; note = Nucleotide with phosphorothioate linkage
  modified_base 126: mod_base = OTHER; note = 2'-O-methyl modified nucleotide with phosphorothioate linkage
  modified_base 127: mod_base = OTHER; note = 2'-O-methyl modified nucleotide with phosphorothioate linkage
  modified_base 128: mod_base = OTHER; note = 2'-O-methyl modified nucleotide
actcacgctggatagcctccgttttagagctagaaatagcaagttaaaataaggctagtccgttatcaacttgaaaaagtggcaccgagtcggtgctctctttctggcctggatgatggctatccagc

SEQ ID NO: 17556 - RNA, 127 nt, synthetic construct
  source 1..127: mol_type = other RNA
  modified_base 1: mod_base = OTHER; note = 2'-O-methyl modified nucleotide with phosphorothioate linkage
  modified_base 2: mod_base = OTHER; note = 2'-O-methyl modified nucleotide with phosphorothioate linkage
  modified_base 3: mod_base = OTHER; note = 2'-O-methyl modified nucleotide with phosphorothioate linkage
  modified_base 29: mod_base = OTHER; note = 2'-O-methyl modified nucleotide
  modified_base 30: mod_base = OTHER; note = 2'-O-methyl modified nucleotide
  modified_base 31: mod_base = OTHER; note = 2'-O-methyl modified nucleotide
  modified_base 32: mod_base = OTHER; note = 2'-O-methyl modified nucleotide
  modified_base 33: mod_base = OTHER; note = 2'-O-methyl modified nucleotide
  modified_base 34: mod_base = OTHER; note = 2'-O-methyl modified nucleotide
  modified_base 35: mod_base = OTHER; note = 2'-O-methyl modified nucleotide
  modified_base 36: mod_base = OTHER; note = 2'-O-methyl modified nucleotide
  modified_base 37: mod_base = OTHER; note = 2'-O-methyl modified nucleotide
  modified_base 38: mod_base = OTHER; note = 2'-O-methyl modified nucleotide
  modified_base 39: mod_base = OTHER; note = 2'-O-methyl modified nucleotide
  modified_base 40: mod_base = OTHER; note = 2'-O-methyl modified nucleotide
  modified_base 69: mod_base = OTHER; note = 2'-O-methyl modified nucleotide
  modified_base 70: mod_base = OTHER; note = 2'-O-methyl modified nucleotide
  modified_base 71: mod_base = OTHER; note = 2'-O-methyl modified nucleotide
  modified_base 72: mod_base = OTHER; note = 2'-O-methyl modified nucleotide
  modified_base 73: mod_base = OTHER; note = 2'-O-methyl modified nucleotide
  modified_base 74: mod_base = OTHER; note = 2'-O-methyl modified nucleotide
  modified_base 75: mod_base = OTHER; note = 2'-O-methyl modified nucleotide
  modified_base 76: mod_base = OTHER; note = 2'-O-methyl modified nucleotide
  modified_base 77: mod_base = OTHER; note = 2'-O-methyl modified nucleotide
  modified_base 78: mod_base = OTHER; note = 2'-O-methyl modified nucleotide
  modified_base 79: mod_base = OTHER; note = 2'-O-methyl modified nucleotide
  modified_base 80: mod_base = OTHER; note = 2'-O-methyl modified nucleotide
  modified_base 81: mod_base = OTHER; note = 2'-O-methyl modified nucleotide
  modified_base 82: mod_base = OTHER; note = 2'-O-methyl modified nucleotide
  modified_base 83: mod_base = OTHER; note = 2'-O-methyl modified nucleotide
  modified_base 84: mod_base = OTHER; note = 2'-O-methyl modified nucleotide
  modified_base 85: mod_base = OTHER; note = 2'-O-methyl modified nucleotide
  modified_base 86: mod_base = OTHER; note = 2'-O-methyl modified nucleotide
  modified_base 87: mod_base = OTHER; note = 2'-O-methyl modified nucleotide
  modified_base 88: mod_base = OTHER; note = 2'-O-methyl modified nucleotide
  modified_base 89: mod_base = OTHER; note = 2'-O-methyl modified nucleotide
  modified_base 90: mod_base = OTHER; note = 2'-O-methyl modified nucleotide
  modified_base 91: mod_base = OTHER; note = 2'-O-methyl modified nucleotide
  modified_base 92: mod_base = OTHER; note = 2'-O-methyl modified nucleotide
  modified_base 93: mod_base = OTHER; note = 2'-O-methyl modified nucleotide
  modified_base 94: mod_base = OTHER; note = 2'-O-methyl modified nucleotide
  modified_base 95: mod_base = OTHER; note = 2'-O-methyl modified nucleotide
  modified_base 96: mod_base = OTHER; note = 2'-O-methyl modified nucleotide
  modified_base 124: mod_base = OTHER; note = Nucleotide with phosphorothioate linkage
  modified_base 125: mod_base = OTHER; note = 2'-O-methyl modified nucleotide with phosphorothioate linkage
  modified_base 126: mod_base = OTHER; note = 2'-O-methyl modified nucleotide with phosphorothioate linkage
  modified_base 127: mod_base = OTHER; note = 2'-O-methyl modified nucleotide
actcacgctggatagcctccgttttagagctagaaatagcaagttaaaataaggctagtccgttatcaacttgaaaaagtggcaccgagtcggtgctctctttctggcctggatgatggctatccag

SEQ ID NO: 17557 - RNA, 126 nt, synthetic construct
  source 1..126: mol_type = other RNA
  modified_base 1: mod_base = OTHER; note = 2'-O-methyl modified nucleotide with phosphorothioate linkage
  modified_base 2: mod_base = OTHER; note = 2'-O-methyl modified nucleotide with phosphorothioate linkage
  modified_base 3: mod_base = OTHER; note = 2'-O-methyl modified nucleotide with phosphorothioate linkage
  modified_base 29: mod_base = OTHER; note = 2'-O-methyl modified nucleotide
  modified_base 30: mod_base = OTHER; note = 2'-O-methyl modified nucleotide
  modified_base 31: mod_base = OTHER; note = 2'-O-methyl modified nucleotide
  modified_base 32: mod_base = OTHER; note = 2'-O-methyl modified nucleotide
  modified_base 33: mod_base = OTHER; note = 2'-O-methyl modified nucleotide
  modified_base 34: mod_base = OTHER; note = 2'-O-methyl modified nucleotide
  modified_base 35: mod_base = OTHER; note = 2'-O-methyl modified nucleotide
  modified_base 36: mod_base = OTHER; note = 2'-O-methyl modified nucleotide
  modified_base 37: mod_base = OTHER; note = 2'-O-methyl modified nucleotide
  modified_base 38: mod_base = OTHER; note = 2'-O-methyl modified nucleotide
  modified_base 39: mod_base = OTHER; note = 2'-O-methyl modified nucleotide
  modified_base 40: mod_base = OTHER; note = 2'-O-methyl modified nucleotide
  modified_base 69: mod_base = OTHER; note = 2'-O-methyl modified nucleotide
  modified_base 70: mod_base = OTHER; note = 2'-O-methyl modified nucleotide
  modified_base 71: mod_base = OTHER; note = 2'-O-methyl modified nucleotide
  modified_base 72: mod_base = OTHER; note = 2'-O-methyl modified nucleotide
  modified_base 73: mod_base = OTHER; note = 2'-O-methyl modified nucleotide
  modified_base 74: mod_base = OTHER; note = 2'-O-methyl modified nucleotide
  modified_base 75: mod_base = OTHER; note = 2'-O-methyl modified nucleotide
  modified_base 76: mod_base = OTHER; note = 2'-O-methyl modified nucleotide
  modified_base 77: mod_base = OTHER; note = 2'-O-methyl modified nucleotide
  modified_base 78: mod_base = OTHER; note = 2'-O-methyl modified nucleotide
  modified_base 79: mod_base = OTHER; note = 2'-O-methyl modified nucleotide
  modified_base 80: mod_base = OTHER; note = 2'-O-methyl modified nucleotide
  modified_base 81: mod_base = OTHER; note = 2'-O-methyl modified nucleotide
  modified_base 82: mod_base = OTHER; note = 2'-O-methyl modified nucleotide
  modified_base 83: mod_base = OTHER; note = 2'-O-methyl modified nucleotide
  modified_base 84: mod_base = OTHER; note = 2'-O-methyl modified nucleotide
  modified_base 85: mod_base = OTHER; note = 2'-O-methyl modified nucleotide
  modified_base 86: mod_base = OTHER; note = 2'-O-methyl modified nucleotide
  modified_base 87: mod_base = OTHER; note = 2'-O-methyl modified nucleotide
  modified_base 88: mod_base = OTHER; note = 2'-O-methyl modified nucleotide
  modified_base 89: mod_base = OTHER; note = 2'-O-methyl modified nucleotide
  modified_base 90: mod_base = OTHER; note = 2'-O-methyl modified nucleotide
  modified_base 91: mod_base = OTHER; note = 2'-O-methyl modified nucleotide
  modified_base 92: mod_base = OTHER; note = 2'-O-methyl modified nucleotide
  modified_base 93: mod_base = OTHER; note = 2'-O-methyl modified nucleotide
  modified_base 94: mod_base = OTHER; note = 2'-O-methyl modified nucleotide
  modified_base 95: mod_base = OTHER; note = 2'-O-methyl modified nucleotide
  modified_base 96: mod_base = OTHER; note = 2'-O-methyl modified nucleotide
  modified_base 123: mod_base = OTHER; note = Nucleotide with phosphorothioate linkage
  modified_base 124: mod_base = OTHER; note = 2'-O-methyl modified nucleotide with phosphorothioate linkage
  modified_base 125: mod_base = OTHER; note = 2'-O-methyl modified nucleotide with phosphorothioate linkage
  modified_base 126: mod_base = OTHER; note = 2'-O-methyl modified nucleotide
actcacgctggatagcctccgttttagagctagaaatagcaagttaaaataaggctagtccgttatcaacttgaaaaagtggcaccgagtcggtgctctctttctggcctggatgatggctatcca

SEQ ID NO: 17558 - RNA, 125 nt, synthetic construct
  source 1..125: mol_type = other RNA
  modified_base 1: mod_base = OTHER; note = 2'-O-methyl modified nucleotide with phosphorothioate linkage
  modified_base 2: mod_base = OTHER; note = 2'-O-methyl modified nucleotide with phosphorothioate linkage
  modified_base 3: mod_base = OTHER; note = 2'-O-methyl modified nucleotide with phosphorothioate linkage
  modified_base 29: mod_base = OTHER; note = 2'-O-methyl modified nucleotide
  modified_base 30: mod_base = OTHER; note = 2'-O-methyl modified nucleotide
  modified_base 31: mod_base = OTHER; note = 2'-O-methyl modified nucleotide
  modified_base 32: mod_base = OTHER; note = 2'-O-methyl modified nucleotide
  modified_base 33: mod_base = OTHER; note = 2'-O-methyl modified nucleotide
  modified_base 34: mod_base = OTHER; note = 2'-O-methyl modified nucleotide
  modified_base 35: mod_base = OTHER; note = 2'-O-methyl modified nucleotide
  modified_base 36: mod_base = OTHER; note = 2'-O-methyl modified nucleotide
  modified_base 37: mod_base = OTHER; note = 2'-O-methyl modified nucleotide
  modified_base 38: mod_base = OTHER; note = 2'-O-methyl modified nucleotide
  modified_base 39: mod_base = OTHER; note = 2'-O-methyl modified nucleotide
  modified_base 40: mod_base = OTHER; note = 2'-O-methyl modified nucleotide
  modified_base 69: mod_base = OTHER; note = 2'-O-methyl modified nucleotide
  modified_base 70: mod_base = OTHER; note = 2'-O-methyl modified nucleotide
  modified_base 71: mod_base = OTHER; note = 2'-O-methyl modified nucleotide
  modified_base 72: mod_base = OTHER; note = 2'-O-methyl modified nucleotide
  modified_base 73: mod_base = OTHER; note = 2'-O-methyl modified nucleotide
  modified_base 74: mod_base = OTHER; note = 2'-O-methyl modified nucleotide
  modified_base 75: mod_base = OTHER; note = 2'-O-methyl modified nucleotide
  modified_base 76: mod_base = OTHER; note = 2'-O-methyl modified nucleotide
  modified_base 77: mod_base = OTHER; note = 2'-O-methyl modified nucleotide
  modified_base 78: mod_base = OTHER; note = 2'-O-methyl modified nucleotide
  modified_base 79: mod_base = OTHER; note = 2'-O-methyl modified nucleotide
  modified_base 80: mod_base = OTHER; note = 2'-O-methyl modified nucleotide
  modified_base 81: mod_base = OTHER; note = 2'-O-methyl modified nucleotide
  modified_base 82: mod_base = OTHER; note = 2'-O-methyl modified nucleotide
  modified_base 83: mod_base = OTHER; note = 2'-O-methyl modified nucleotide
  modified_base 84: mod_base = OTHER; note = 2'-O-methyl modified nucleotide
  modified_base 85: mod_base = OTHER; note = 2'-O-methyl modified nucleotide
  modified_base 86: mod_base = OTHER; note = 2'-O-methyl modified nucleotide
  modified_base 87: mod_base = OTHER; note = 2'-O-methyl modified nucleotide
  modified_base 88: mod_base = OTHER; note = 2'-O-methyl modified nucleotide
  modified_base 89: mod_base = OTHER; note = 2'-O-methyl modified nucleotide
  modified_base 90: mod_base = OTHER; note = 2'-O-methyl modified nucleotide
  modified_base 91: mod_base = OTHER; note = 2'-O-methyl modified nucleotide
  modified_base 92: mod_base = OTHER; note = 2'-O-methyl modified nucleotide
  modified_base 93: mod_base = OTHER; note = 2'-O-methyl modified nucleotide
  modified_base 94: mod_base = OTHER; note = 2'-O-methyl modified nucleotide
  modified_base 95: mod_base = OTHER; note = 2'-O-methyl modified nucleotide
  modified_base 96: mod_base = OTHER; note = 2'-O-methyl modified nucleotide
  modified_base 122: mod_base = OTHER; note = Nucleotide with phosphorothioate linkage
  modified_base 123: mod_base = OTHER; note = 2'-O-methyl modified nucleotide with phosphorothioate linkage
  modified_base 124: mod_base = OTHER; note = 2'-O-methyl modified nucleotide with phosphorothioate linkage
  modified_base 125: mod_base = OTHER; note = 2'-O-methyl modified nucleotide
actcacgctggatagcctccgttttagagctagaaatagcaagttaaaataaggctagtccgttatcaacttgaaaaagtggcaccgagtcggtgctctctttctggcctggatgatggctatcc

SEQ ID NO: 17559 - RNA, 132 nt, synthetic construct
  source 1..132: mol_type = other RNA
  modified_base 1: mod_base = OTHER; note = 2'-O-methyl modified nucleotide with phosphorothioate linkage
  modified_base 2: mod_base = OTHER; note = 2'-O-methyl modified nucleotide with phosphorothioate linkage
  modified_base 3: mod_base = OTHER; note = 2'-O-methyl modified nucleotide with phosphorothioate linkage
  modified_base 29: mod_base = OTHER; note = 2'-O-methyl modified nucleotide
  modified_base 30: mod_base = OTHER; note = 2'-O-methyl modified nucleotide
  modified_base 31: mod_base = OTHER; note = 2'-O-methyl modified nucleotide
  modified_base 32: mod_base = OTHER; note = 2'-O-methyl modified nucleotide
  modified_base 33: mod_base = OTHER; note = 2'-O-methyl modified nucleotide
  modified_base 34: mod_base = OTHER; note = 2'-O-methyl modified nucleotide
  modified_base 35: mod_base = OTHER; note = 2'-O-methyl modified nucleotide
  modified_base 36: mod_base = OTHER; note = 2'-O-methyl modified nucleotide
  modified_base 37: mod_base = OTHER; note = 2'-O-methyl modified nucleotide
  modified_base 38: mod_base = OTHER; note = 2'-O-methyl modified nucleotide
  modified_base 39: mod_base = OTHER; note = 2'-O-methyl modified nucleotide
  modified_base 40: mod_base = OTHER; note = 2'-O-methyl modified nucleotide
  modified_base 69: mod_base = OTHER; note = 2'-O-methyl modified nucleotide
  modified_base 70: mod_base = OTHER; note = 2'-O-methyl modified nucleotide
  modified_base 71: mod_base = OTHER; note = 2'-O-methyl modified nucleotide
  modified_base 72: mod_base = OTHER; note = 2'-O-methyl modified nucleotide
  modified_base 73: mod_base = OTHER; note = 2'-O-methyl modified nucleotide
  modified_base 74: mod_base = OTHER; note = 2'-O-methyl modified nucleotide
  modified_base 75: mod_base = OTHER; note = 2'-O-methyl modified nucleotide
  modified_base 76: mod_base = OTHER; note = 2'-O-methyl modified nucleotide
  modified_base 77: mod_base = OTHER; note = 2'-O-methyl modified nucleotide
  modified_base 78: mod_base = OTHER; note = 2'-O-methyl modified nucleotide
  modified_base 79: mod_base = OTHER; note = 2'-O-methyl modified nucleotide
  modified_base 80: mod_base = OTHER; note = 2'-O-methyl modified nucleotide
  modified_base 81: mod_base = OTHER; note = 2'-O-methyl modified nucleotide
  modified_base 82: mod_base = OTHER; note = 2'-O-methyl modified nucleotide
  modified_base 83: mod_base = OTHER; note = 2'-O-methyl modified nucleotide
  modified_base 84: mod_base = OTHER; note = 2'-O-methyl modified nucleotide
  modified_base 85: mod_base = OTHER; note = 2'-O-methyl modified nucleotide
  modified_base 86: mod_base = OTHER; note = 2'-O-methyl modified nucleotide
  modified_base 87: mod_base = OTHER; note = 2'-O-methyl modified nucleotide
  modified_base 88: mod_base = OTHER; note = 2'-O-methyl modified nucleotide
  modified_base 89: mod_base = OTHER; note = 2'-O-methyl modified nucleotide
  modified_base 90: mod_base = OTHER; note = 2'-O-methyl modified nucleotide
  modified_base 91: mod_base = OTHER; note = 2'-O-methyl modified nucleotide
  modified_base 92: mod_base = OTHER; note = 2'-O-methyl modified nucleotide
  modified_base 93: mod_base = OTHER; note = 2'-O-methyl modified nucleotide
  modified_base 94: mod_base = OTHER; note = 2'-O-methyl modified nucleotide
  modified_base 95: mod_base = OTHER; note = 2'-O-methyl modified nucleotide
  modified_base 96: mod_base = OTHER; note = 2'-O-methyl modified nucleotide
  modified_base 129: mod_base = OTHER; note = Nucleotide with phosphorothioate linkage
  modified_base 130: mod_base = OTHER; note = 2'-O-methyl modified nucleotide with phosphorothioate linkage
  modified_base 131: mod_base = OTHER; note = 2'-O-methyl modified nucleotide with phosphorothioate linkage
  modified_base 132: mod_base = OTHER; note = 2'-O-methyl modified nucleotide
actcacgctggatagcctccgttttagagctagaaatagcaagttaaaataaggctagtccgttatcaacttgaaaaagtggcaccgagtcggtgctctctctttctggcctggatgatggctatccagcgt

SEQ ID NO: 17560 - RNA, 131 nt, synthetic construct
  source 1..131: mol_type = other RNA
  modified_base 1: mod_base = OTHER; note = 2'-O-methyl modified nucleotide with phosphorothioate linkage
  modified_base 2: mod_base = OTHER; note = 2'-O-methyl modified nucleotide with phosphorothioate linkage
  modified_base 3: mod_base = OTHER; note = 2'-O-methyl modified nucleotide with phosphorothioate linkage
  modified_base 29: mod_base = OTHER; note = 2'-O-methyl modified nucleotide
  modified_base 30: mod_base = OTHER; note = 2'-O-methyl modified nucleotide
  modified_base 31: mod_base = OTHER; note = 2'-O-methyl modified nucleotide
  modified_base 32: mod_base = OTHER; note = 2'-O-methyl modified nucleotide
  modified_base 33: mod_base = OTHER; note = 2'-O-methyl modified nucleotide
  modified_base 34: mod_base = OTHER; note = 2'-O-methyl modified nucleotide
  modified_base 35: mod_base = OTHER; note = 2'-O-methyl modified nucleotide
  modified_base 36: mod_base = OTHER; note = 2'-O-methyl modified nucleotide
  modified_base 37: mod_base = OTHER; note = 2'-O-methyl modified nucleotide
  modified_base 38: mod_base = OTHER; note = 2'-O-methyl modified nucleotide
  modified_base 39: mod_base = OTHER; note = 2'-O-methyl modified nucleotide
  modified_base 40: mod_base = OTHER; note = 2'-O-methyl modified nucleotide
  modified_base 69: mod_base = OTHER; note = 2'-O-methyl modified nucleotide
  modified_base 70: mod_base = OTHER; note = 2'-O-methyl modified nucleotide
  modified_base 71: mod_base = OTHER; note = 2'-O-methyl modified nucleotide
  modified_base 72: mod_base = OTHER; note = 2'-O-methyl modified nucleotide
  modified_base 73: mod_base = OTHER; note = 2'-O-methyl modified nucleotide
  modified_base 74: mod_base = OTHER; note = 2'-O-methyl modified nucleotide
  modified_base 75: mod_base = OTHER; note = 2'-O-methyl modified nucleotide
  modified_base 76: mod_base = OTHER; note = 2'-O-methyl modified nucleotide
  modified_base 77: mod_base = OTHER; note = 2'-O-methyl modified nucleotide
  modified_base 78: mod_base = OTHER; note = 2'-O-methyl modified nucleotide
  modified_base 79: mod_base = OTHER; note = 2'-O-methyl modified nucleotide
  modified_base 80: mod_base = OTHER; note = 2'-O-methyl modified nucleotide
  modified_base 81: mod_base = OTHER; note = 2'-O-methyl modified nucleotide
  modified_base 82: mod_base = OTHER; note = 2'-O-methyl modified nucleotide
  modified_base 83: mod_base = OTHER; note = 2'-O-methyl modified nucleotide
  modified_base 84: mod_base = OTHER; note = 2'-O-methyl modified nucleotide
  modified_base 85: mod_base = OTHER; note = 2'-O-methyl modified nucleotide
  modified_base 86: mod_base = OTHER; note = 2'-O-methyl modified nucleotide
  modified_base 87: mod_base = OTHER; note = 2'-O-methyl modified nucleotide
  modified_base 88: mod_base = OTHER; note = 2'-O-methyl modified nucleotide
  modified_base 89: mod_base = OTHER; note = 2'-O-methyl modified nucleotide
  modified_base 90: mod_base = OTHER; note = 2'-O-methyl modified nucleotide
  modified_base 91: mod_base = OTHER; note = 2'-O-methyl modified nucleotide
  modified_base 92: mod_base = OTHER; note = 2'-O-methyl modified nucleotide
  modified_base 93: mod_base = OTHER; note = 2'-O-methyl modified nucleotide
  modified_base 94: mod_base = OTHER; note = 2'-O-methyl modified nucleotide
  modified_base 95: mod_base = OTHER; note = 2'-O-methyl modified nucleotide
  modified_base 96: mod_base = OTHER; note = 2'-O-methyl modified nucleotide
  modified_base 128: mod_base = OTHER; note = Nucleotide with phosphorothioate linkage
  modified_base 129: mod_base = OTHER; note = 2'-O-methyl modified nucleotide with phosphorothioate linkage
  modified_base 130: mod_base = OTHER; note = 2'-O-methyl modified nucleotide with phosphorothioate linkage
  modified_base 131: mod_base = OTHER; note = 2'-O-methyl modified nucleotide
actcacgctggatagcctccgttttagagctagaaatagcaagttaaaataaggctagtccgttatcaacttgaaaaagtggcaccgagtcggtgctctctctttctggcctggatgatggctatccagcg

SEQ ID NO: 17561 - RNA, 130 nt, synthetic construct
  source 1..130: mol_type = other RNA
  modified_base 1: mod_base = OTHER; note = 2'-O-methyl modified nucleotide with phosphorothioate linkage
  modified_base 2: mod_base = OTHER; note = 2'-O-methyl modified nucleotide with phosphorothioate linkage
  modified_base 3: mod_base = OTHER; note = 2'-O-methyl modified nucleotide with phosphorothioate linkage
  modified_base 29: mod_base = OTHER; note = 2'-O-methyl modified nucleotide
  modified_base 30: mod_base = OTHER; note = 2'-O-methyl modified nucleotide
  modified_base 31: mod_base = OTHER; note = 2'-O-methyl modified nucleotide
  modified_base 32: mod_base = OTHER; note = 2'-O-methyl modified nucleotide
  modified_base 33: mod_base = OTHER; note = 2'-O-methyl modified nucleotide
  modified_base 34: mod_base = OTHER; note = 2'-O-methyl modified nucleotide
  modified_base 35: mod_base = OTHER; note = 2'-O-methyl modified nucleotide
  modified_base 36: mod_base = OTHER; note = 2'-O-methyl modified nucleotide
  modified_base 37: mod_base = OTHER; note = 2'-O-methyl modified nucleotide
  modified_base 38: mod_base = OTHER; note = 2'-O-methyl modified nucleotide
  modified_base 39: mod_base = OTHER; note = 2'-O-methyl modified nucleotide
  modified_base 40: mod_base = OTHER; note = 2'-O-methyl modified nucleotide
  modified_base 69: mod_base = OTHER; note = 2'-O-methyl modified nucleotide
  modified_base 70: mod_base = OTHER; note = 2'-O-methyl modified nucleotide
  modified_base 71: mod_base = OTHER; note = 2'-O-methyl modified nucleotide
  modified_base 72: mod_base = OTHER; note = 2'-O-methyl modified nucleotide
  modified_base 73: mod_base = OTHER; note = 2'-O-methyl modified nucleotide
  modified_base 74: mod_base = OTHER; note = 2'-O-methyl modified nucleotide
  modified_base 75: mod_base = OTHER; note = 2'-O-methyl modified nucleotide
  modified_base 76: mod_base = OTHER; note = 2'-O-methyl modified nucleotide
  modified_base 77: mod_base = OTHER; note = 2'-O-methyl modified nucleotide
  modified_base 78: mod_base = OTHER; note = 2'-O-methyl modified nucleotide
  modified_base 79: mod_base = OTHER; note = 2'-O-methyl modified nucleotide
  modified_base 80: mod_base = OTHER; note = 2'-O-methyl modified nucleotide
  modified_base 81: mod_base = OTHER; note = 2'-O-methyl modified nucleotide
  modified_base 82: mod_base = OTHER; note = 2'-O-methyl modified nucleotide
  modified_base 83: mod_base = OTHER; note = 2'-O-methyl modified nucleotide
  modified_base 84: mod_base = OTHER; note = 2'-O-methyl modified nucleotide
  modified_base 85: mod_base = OTHER; note = 2'-O-methyl modified nucleotide
  modified_base 86: mod_base = OTHER; note = 2'-O-methyl modified nucleotide
  modified_base 87: mod_base = OTHER; note = 2'-O-methyl modified nucleotide
  modified_base 88: mod_base = OTHER; note = 2'-O-methyl modified nucleotide
  modified_base 89: mod_base = OTHER; note = 2'-O-methyl modified nucleotide
  modified_base 90: mod_base = OTHER; note = 2'-O-methyl modified nucleotide
  modified_base 91: mod_base = OTHER; note = 2'-O-methyl modified nucleotide
  modified_base 92: mod_base = OTHER; note = 2'-O-methyl modified nucleotide
  modified_base 93: mod_base = OTHER; note = 2'-O-methyl modified nucleotide
  modified_base 94: mod_base = OTHER; note = 2'-O-methyl modified nucleotide
  modified_base 95: mod_base = OTHER; note = 2'-O-methyl modified nucleotide
  modified_base 96: mod_base = OTHER; note = 2'-O-methyl modified nucleotide
  modified_base 127: mod_base = OTHER; note = Nucleotide with phosphorothioate linkage
  modified_base 128: mod_base = OTHER; note = 2'-O-methyl modified nucleotide with phosphorothioate linkage
  modified_base 129: mod_base = OTHER; note = 2'-O-methyl modified nucleotide with phosphorothioate linkage
  modified_base 130: mod_base = OTHER; note = 2'-O-methyl modified nucleotide
actcacgctggatagcctccgttttagagctagaaatagcaagttaaaataaggctagtccgttatcaacttgaaaaagtggcaccgagtcggtgctctctctttctggcctggatgatggctatccagc

SEQ ID NO: 17562 - RNA, 129 nt, synthetic construct
  source 1..129: mol_type = other RNA
  modified_base 1: mod_base = OTHER; note = 2'-O-methyl modified nucleotide with phosphorothioate linkage
  modified_base 2: mod_base = OTHER; note = 2'-O-methyl modified nucleotide with phosphorothioate linkage
  modified_base 3: mod_base = OTHER; note = 2'-O-methyl modified nucleotide with phosphorothioate linkage
  modified_base 29: mod_base = OTHER; note = 2'-O-methyl modified nucleotide
  modified_base 30: mod_base = OTHER; note = 2'-O-methyl modified nucleotide
  modified_base 31: mod_base = OTHER; note = 2'-O-methyl modified nucleotide
  modified_base 32: mod_base = OTHER; note = 2'-O-methyl modified nucleotide
  modified_base 33: mod_base = OTHER; note = 2'-O-methyl modified nucleotide
  modified_base 34: mod_base = OTHER; note = 2'-O-methyl modified nucleotide
  modified_base 35: mod_base = OTHER; note = 2'-O-methyl modified nucleotide
  modified_base 36: mod_base = OTHER; note = 2'-O-methyl modified nucleotide
  modified_base 37: mod_base = OTHER; note = 2'-O-methyl modified nucleotide
  modified_base 38: mod_base = OTHER; note = 2'-O-methyl modified nucleotide
  modified_base 39: mod_base = OTHER; note = 2'-O-methyl modified nucleotide
  modified_base 40: mod_base = OTHER; note = 2'-O-methyl modified nucleotide
  modified_base 69: mod_base = OTHER; note = 2'-O-methyl modified nucleotide
  modified_base 70: mod_base = OTHER; note = 2'-O-methyl modified nucleotide
  modified_base 71: mod_base = OTHER; note = 2'-O-methyl modified nucleotide
  modified_base 72: mod_base = OTHER; note = 2'-O-methyl modified nucleotide
  modified_base 73: mod_base = OTHER; note = 2'-O-methyl modified nucleotide
  modified_base 74: mod_base = OTHER; note = 2'-O-methyl modified nucleotide
  modified_base 75: mod_base = OTHER; note = 2'-O-methyl modified nucleotide
  modified_base 76: mod_base = OTHER; note = 2'-O-methyl modified nucleotide
  modified_base 77: mod_base = OTHER; note = 2'-O-methyl modified nucleotide
  modified_base 78: mod_base = OTHER; note = 2'-O-methyl modified nucleotide
  modified_base 79: mod_base = OTHER; note = 2'-O-methyl modified nucleotide
  modified_base 80: mod_base = OTHER; note = 2'-O-methyl modified nucleotide
  modified_base 81: mod_base = OTHER; note = 2'-O-methyl modified nucleotide
  modified_base 82: mod_base = OTHER; note = 2'-O-methyl modified nucleotide
  modified_base 83: mod_base = OTHER; note = 2'-O-methyl modified nucleotide
  modified_base 84: mod_base = OTHER; note = 2'-O-methyl modified nucleotide
  modified_base 85: mod_base = OTHER; note = 2'-O-methyl modified nucleotide
  modified_base 86: mod_base = OTHER; note = 2'-O-methyl modified nucleotide
  modified_base 87: mod_base = OTHER; note = 2'-O-methyl modified nucleotide
  modified_base 88: mod_base = OTHER; note = 2'-O-methyl modified nucleotide
  modified_base 89: mod_base = OTHER; note = 2'-O-methyl modified nucleotide
  modified_base 90: mod_base = OTHER; note = 2'-O-methyl modified nucleotide
  modified_base 91: mod_base = OTHER; note = 2'-O-methyl modified nucleotide
  modified_base 92: mod_base = OTHER; note = 2'-O-methyl modified nucleotide
  modified_base 93: mod_base = OTHER; note = 2'-O-methyl modified nucleotide
  modified_base 94: mod_base = OTHER; note = 2'-O-methyl modified nucleotide
  modified_base 95: mod_base = OTHER; note = 2'-O-methyl modified nucleotide
  modified_base 96: mod_base = OTHER; note = 2'-O-methyl modified nucleotide
  modified_base 126: mod_base = OTHER; note = Nucleotide with phosphorothioate linkage
  modified_base 127: mod_base = OTHER; note = 2'-O-methyl modified nucleotide with phosphorothioate linkage
  modified_base 128: mod_base = OTHER; note = 2'-O-methyl modified nucleotide with phosphorothioate linkage
  modified_base 129: mod_base = OTHER; note = 2'-O-methyl modified nucleotide
actcacgctggatagcctccgttttagagctagaaatagcaagttaaaataaggctagtccgttatcaacttgaaaaagtggcaccgagtcggtgctctctctttctggcctggatgatggctatccag

SEQ ID NO: 17563 - RNA, 128 nt, synthetic construct
  source 1..128: mol_type = other RNA
  modified_base 1: mod_base = OTHER; note = 2'-O-methyl modified nucleotide with phosphorothioate linkage
  modified_base 2: mod_base = OTHER; note = 2'-O-methyl modified nucleotide with phosphorothioate linkage
  modified_base 3: mod_base = OTHER; note = 2'-O-methyl modified nucleotide with phosphorothioate linkage
  modified_base 29: mod_base = OTHER; note = 2'-O-methyl modified nucleotide
  modified_base 30: mod_base = OTHER; note = 2'-O-methyl modified nucleotide
  modified_base 31: mod_base = OTHER; note = 2'-O-methyl modified nucleotide
  modified_base 32: mod_base = OTHER; note = 2'-O-methyl modified nucleotide
  modified_base 33: mod_base = OTHER; note = 2'-O-methyl modified nucleotide
  modified_base 34: mod_base = OTHER; note = 2'-O-methyl modified nucleotide
  modified_base 35: mod_base = OTHER; note = 2'-O-methyl modified nucleotide
  modified_base 36: mod_base = OTHER; note = 2'-O-methyl modified nucleotide
  modified_base 37: mod_base = OTHER; note = 2'-O-methyl modified nucleotide
  modified_base 38: mod_base = OTHER; note = 2'-O-methyl modified nucleotide
  modified_base 39: mod_base = OTHER; note = 2'-O-methyl modified nucleotide
  modified_base 40: mod_base = OTHER; note = 2'-O-methyl modified nucleotide
  modified_base 69: mod_base = OTHER; note = 2'-O-methyl modified nucleotide
  modified_base 70: mod_base = OTHER; note = 2'-O-methyl modified nucleotide
  modified_base 71: mod_base = OTHER; note = 2'-O-methyl modified nucleotide
  modified_base 72: mod_base = OTHER; note = 2'-O-methyl modified nucleotide
  modified_base 73: mod_base = OTHER; note = 2'-O-methyl modified nucleotide
  modified_base 74: mod_base = OTHER; note = 2'-O-methyl modified nucleotide
  modified_base 75: mod_base = OTHER; note = 2'-O-methyl modified nucleotide
  modified_base 76: mod_base = OTHER; note = 2'-O-methyl modified nucleotide
  modified_base 77: mod_base = OTHER; note = 2'-O-methyl modified nucleotide
  modified_base 78: mod_base = OTHER; note = 2'-O-methyl modified nucleotide
  modified_base 79: mod_base = OTHER; note = 2'-O-methyl modified nucleotide
  modified_base 80: mod_base = OTHER; note = 2'-O-methyl modified nucleotide
  modified_base 81: mod_base = OTHER; note = 2'-O-methyl modified nucleotide
  modified_base 82: mod_base = OTHER; note = 2'-O-methyl modified nucleotide
  modified_base 83: mod_base = OTHER; note = 2'-O-methyl modified nucleotide
  modified_base 84: mod_base = OTHER; note = 2'-O-methyl modified nucleotide
  modified_base 85: mod_base = OTHER; note = 2'-O-methyl modified nucleotide
  modified_base 86: mod_base = OTHER; note = 2'-O-methyl modified nucleotide
  modified_base 87: mod_base = OTHER; note = 2'-O-methyl modified nucleotide
  modified_base 88: mod_base = OTHER; note = 2'-O-methyl modified nucleotide
  modified_base 89: mod_base = OTHER; note = 2'-O-methyl modified nucleotide
  modified_base 90: mod_base = OTHER; note = 2'-O-methyl modified nucleotide
  modified_base 91: mod_base = OTHER; note = 2'-O-methyl modified nucleotide
  modified_base 92: mod_base = OTHER; note = 2'-O-methyl modified nucleotide
  modified_base 93: mod_base = OTHER; note = 2'-O-methyl modified nucleotide
  modified_base 94: mod_base = OTHER; note = 2'-O-methyl modified nucleotide
  modified_base 95: mod_base = OTHER; note = 2'-O-methyl modified nucleotide
  modified_base 96: mod_base = OTHER; note = 2'-O-methyl modified nucleotide
  modified_base 125: mod_base = OTHER; note = Nucleotide with phosphorothioate linkage
  modified_base 126: mod_base = OTHER; note = 2'-O-methyl modified nucleotide with phosphorothioate linkage
  modified_base 127: mod_base = OTHER; note = 2'-O-methyl modified nucleotide with phosphorothioate linkage
  modified_base 128: mod_base = OTHER; note = 2'-O-methyl modified nucleotide
actcacgctggatagcctccgttttagagctagaaatagcaagttaaaataaggctagtccgttatcaacttgaaaaagtggcaccgagtcggtgctctctctttctggcctggatgatggctatcca

SEQ ID NO: 17564 - RNA, 127 nt, synthetic construct
  source 1..127: mol_type = other RNA
  modified_base 1: mod_base = OTHER; note = 2'-O-methyl modified nucleotide with phosphorothioate linkage
  modified_base 2: mod_base = OTHER; note = 2'-O-methyl modified nucleotide with phosphorothioate linkage
  modified_base 3: mod_base = OTHER; note = 2'-O-methyl modified nucleotide with phosphorothioate linkage
  modified_base 29: mod_base = OTHER; note = 2'-O-methyl modified nucleotide
  modified_base 30: mod_base = OTHER; note = 2'-O-methyl modified nucleotide
  modified_base 31: mod_base = OTHER; note = 2'-O-methyl modified nucleotide
  modified_base 32: mod_base = OTHER; note = 2'-O-methyl modified nucleotide
  modified_base 33: mod_base = OTHER; note = 2'-O-methyl modified nucleotide
  modified_base 34: mod_base = OTHER; note = 2'-O-methyl modified nucleotide
  modified_base 35: mod_base = OTHER; note = 2'-O-methyl modified nucleotide
  modified_base 36: mod_base = OTHER; note = 2'-O-methyl modified nucleotide
  modified_base 37: mod_base = OTHER; note = 2'-O-methyl modified nucleotide
  modified_base 38: mod_base = OTHER; note = 2'-O-methyl modified nucleotide
  modified_base 39: mod_base = OTHER; note = 2'-O-methyl modified nucleotide
  modified_base 40: mod_base = OTHER; note = 2'-O-methyl modified nucleotide
  modified_base 69: mod_base = OTHER; note = 2'-O-methyl modified nucleotide
  modified_base 70: mod_base = OTHER; note = 2'-O-methyl modified nucleotide
  modified_base 71: mod_base = OTHER; note = 2'-O-methyl modified nucleotide
  modified_base 72: mod_base = OTHER; note = 2'-O-methyl modified nucleotide
  modified_base 73: mod_base = OTHER; note = 2'-O-methyl modified nucleotide
  modified_base 74: mod_base = OTHER; note = 2'-O-methyl modified nucleotide
  modified_base 75: mod_base = OTHER; note = 2'-O-methyl modified nucleotide
  modified_base 76: mod_base = OTHER; note = 2'-O-methyl modified nucleotide
  modified_base 77: mod_base = OTHER; note = 2'-O-methyl modified nucleotide
  modified_base 78: mod_base = OTHER; note = 2'-O-methyl modified nucleotide
  modified_base 79: mod_base = OTHER; note = 2'-O-methyl modified nucleotide
  modified_base 80: mod_base = OTHER; note = 2'-O-methyl modified nucleotide
  modified_base 81: mod_base = OTHER; note = 2'-O-methyl modified nucleotide
  modified_base 82: mod_base = OTHER; note = 2'-O-methyl modified nucleotide
  modified_base 83: mod_base = OTHER; note = 2'-O-methyl modified nucleotide
  modified_base 84: mod_base = OTHER; note = 2'-O-methyl modified nucleotide
  modified_base 85: mod_base = OTHER; note = 2'-O-methyl modified nucleotide
  modified_base 86: mod_base = OTHER; note = 2'-O-methyl modified nucleotide
  modified_base 87: mod_base = OTHER; note = 2'-O-methyl modified nucleotide
  modified_base 88: mod_base = OTHER; note = 2'-O-methyl modified nucleotide
  modified_base 89: mod_base = OTHER; note = 2'-O-methyl modified nucleotide
  modified_base 90: mod_base = OTHER; note = 2'-O-methyl modified nucleotide
  modified_base 91: mod_base = OTHER; note = 2'-O-methyl modified nucleotide
  modified_base 92: mod_base = OTHER; note = 2'-O-methyl modified nucleotide
  modified_base 93: mod_base = OTHER; note = 2'-O-methyl modified nucleotide
  modified_base 94: mod_base = OTHER; note = 2'-O-methyl modified nucleotide
  modified_base 95: mod_base = OTHER; note = 2'-O-methyl modified nucleotide
  modified_base 96: mod_base = OTHER; note = 2'-O-methyl modified nucleotide
  modified_base 124: mod_base = OTHER; note = Nucleotide with phosphorothioate linkage
  modified_base 125: mod_base = OTHER; note = 2'-O-methyl modified nucleotide with phosphorothioate linkage
  modified_base 126: mod_base = OTHER; note = 2'-O-methyl modified nucleotide with phosphorothioate linkage
  modified_base 127: mod_base = OTHER; note = 2'-O-methyl modified nucleotide
actcacgctggatagcctccgttttagagctagaaatagcaagttaaaataaggctagtccgttatcaacttgaaaaagtggcaccgagtcggtgctctctctttctggcctggatgatggctatcc

SEQ ID NO: 17565 - RNA, 120 nt, synthetic construct
  source 1..120: mol_type = other RNA
  modified_base 1: mod_base = OTHER; note = 2'-O-methyl modified nucleotide with phosphorothioate linkage
  modified_base 2: mod_base = OTHER; note = 2'-O-methyl modified nucleotide with phosphorothioate linkage
  modified_base 3: mod_base = OTHER; note = 2'-O-methyl modified nucleotide with phosphorothioate linkage
  modified_base 29: mod_base = OTHER; note = 2'-O-methyl modified nucleotide
  modified_base 30: mod_base = OTHER; note = 2'-O-methyl modified nucleotide
  modified_base 31: mod_base = OTHER; note = 2'-O-methyl modified nucleotide
  modified_base 32: mod_base = OTHER; note = 2'-O-methyl modified nucleotide
  modified_base 33: mod_base = OTHER; note = 2'-O-methyl modified nucleotide
  modified_base 34: mod_base = OTHER; note = 2'-O-methyl modified nucleotide
  modified_base 35: mod_base = OTHER; note = 2'-O-methyl modified nucleotide
  modified_base 36: mod_base = OTHER; note = 2'-O-methyl modified nucleotide
  modified_base 37: mod_base = OTHER; note = 2'-O-methyl modified nucleotide
  modified_base 38: mod_base = OTHER; note = 2'-O-methyl modified nucleotide
  modified_base 39: mod_base = OTHER; note = 2'-O-methyl modified nucleotide
  modified_base 40: mod_base = OTHER; note = 2'-O-methyl modified nucleotide
  modified_base 69: mod_base = OTHER; note = 2'-O-methyl modified nucleotide
  modified_base 70: mod_base = OTHER; note = 2'-O-methyl modified nucleotide
  modified_base 71: mod_base = OTHER; note = 2'-O-methyl modified nucleotide
  modified_base 72: mod_base = OTHER; note = 2'-O-methyl modified nucleotide
  modified_base 73: mod_base = OTHER; note = 2'-O-methyl modified nucleotide
  modified_base 74: mod_base = OTHER; note = 2'-O-methyl modified nucleotide
  modified_base 75: mod_base = OTHER; note = 2'-O-methyl modified nucleotide
  modified_base 76: mod_base = OTHER; note = 2'-O-methyl modified nucleotide
  modified_base 77: mod_base = OTHER; note = 2'-O-methyl modified nucleotide
  modified_base 78: mod_base = OTHER; note = 2'-O-methyl modified nucleotide
  modified_base 79: mod_base = OTHER; note = 2'-O-methyl modified nucleotide
  modified_base 80: mod_base = OTHER; note = 2'-O-methyl modified nucleotide
  modified_base 81: mod_base = OTHER; note = 2'-O-methyl modified nucleotide
  modified_base 82: mod_base = OTHER; note = 2'-O-methyl modified nucleotide
  modified_base 83: mod_base = OTHER; note = 2'-O-methyl modified nucleotide
  modified_base 84: mod_base = OTHER; note = 2'-O-methyl modified nucleotide
  modified_base 85: mod_base = OTHER; note = 2'-O-methyl modified nucleotide
  modified_base 86: mod_base = OTHER; note = 2'-O-methyl modified nucleotide
  modified_base 87: mod_base = OTHER; note = 2'-O-methyl modified nucleotide
  modified_base 88: mod_base = OTHER; note = 2'-O-methyl modified nucleotide
  modified_base 89: mod_base = OTHER; note = 2'-O-methyl modified nucleotide
  modified_base 90: mod_base = OTHER; note = 2'-O-methyl modified nucleotide
  modified_base 91: mod_base = OTHER; note = 2'-O-methyl modified nucleotide
  modified_base 92: mod_base = OTHER; note = 2'-O-methyl modified nucleotide
  modified_base 93: mod_base = OTHER; note = 2'-O-methyl modified nucleotide
  modified_base 94: mod_base = OTHER; note = 2'-O-methyl modified nucleotide
  modified_base 95: mod_base = OTHER; note = 2'-O-methyl modified nucleotide
  modified_base 96: mod_base = OTHER; note = 2'-O-methyl modified nucleotide
  modified_base 117: mod_base = OTHER; note = Nucleotide with phosphorothioate linkage
  modified_base 118: mod_base = OTHER; note = 2'-O-methyl modified nucleotide with phosphorothioate linkage
  modified_base 119: mod_base = OTHER; note = 2'-O-methyl modified nucleotide with phosphorothioate linkage
  modified_base 120: mod_base = OTHER; note = 2'-O-methyl modified nucleotide
actcacgctggatagcctccgttttagagctagaaatagcaagttaaaataaggctagtccgttatcaacttgaaaaagtggcaccgagtcggtgcgcctggataacggctatccagcgt

SEQ ID NO: 17566 - RNA, 119 nt, synthetic construct
  source 1..119: mol_type = other RNA
  modified_base 1: mod_base = OTHER; note = 2'-O-methyl modified nucleotide with phosphorothioate linkage
  modified_base 2: mod_base = OTHER; note = 2'-O-methyl modified nucleotide with phosphorothioate linkage
  modified_base 3: mod_base = OTHER; note = 2'-O-methyl modified nucleotide with phosphorothioate linkage
  modified_base 29: mod_base = OTHER; note = 2'-O-methyl modified nucleotide
  modified_base 30: mod_base = OTHER; note = 2'-O-methyl modified nucleotide
  modified_base 31: mod_base = OTHER; note = 2'-O-methyl modified nucleotide
  modified_base 32: mod_base = OTHER; note = 2'-O-methyl modified nucleotide
  modified_base 33: mod_base = OTHER; note = 2'-O-methyl modified nucleotide
  modified_base 34: mod_base = OTHER; note = 2'-O-methyl modified nucleotide
  modified_base 35: mod_base = OTHER; note = 2'-O-methyl modified nucleotide
  modified_base 36: mod_base = OTHER; note = 2'-O-methyl modified nucleotide
  modified_base 37: mod_base = OTHER; note = 2'-O-methyl modified nucleotide
  modified_base 38: mod_base = OTHER; note = 2'-O-methyl modified nucleotide
  modified_base 39: mod_base = OTHER; note = 2'-O-methyl modified nucleotide
  modified_base 40: mod_base = OTHER; note = 2'-O-methyl modified nucleotide
  modified_base 69: mod_base = OTHER; note = 2'-O-methyl modified nucleotide
  modified_base 70: mod_base = OTHER; note = 2'-O-methyl modified nucleotide
  modified_base 71: mod_base = OTHER; note = 2'-O-methyl modified nucleotide
  modified_base 72: mod_base = OTHER; note = 2'-O-methyl modified nucleotide
  modified_base 73: mod_base = OTHER; note = 2'-O-methyl modified nucleotide
  modified_base 74: mod_base = OTHER; note = 2'-O-methyl modified nucleotide
  modified_base 75: mod_base = OTHER; note = 2'-O-methyl modified nucleotide
  modified_base 76: mod_base = OTHER; note = 2'-O-methyl modified nucleotide
  modified_base 77: mod_base = OTHER; note = 2'-O-methyl modified nucleotide
  modified_base 78: mod_base = OTHER; note = 2'-O-methyl modified nucleotide
  modified_base 79: mod_base = OTHER; note = 2'-O-methyl modified nucleotide
  modified_base 80: mod_base = OTHER; note = 2'-O-methyl modified nucleotide
  modified_base 81: mod_base = OTHER; note = 2'-O-methyl modified nucleotide
  modified_base 82: mod_base = OTHER; note = 2'-O-methyl modified nucleotide
  modified_base 83: mod_base = OTHER; note = 2'-O-methyl modified nucleotide
  modified_base 84: mod_base = OTHER; note = 2'-O-methyl modified nucleotide
  modified_base 85: mod_base = OTHER; note = 2'-O-methyl modified nucleotide
  modified_base 86: mod_base = OTHER; note = 2'-O-methyl modified nucleotide
  modified_base 87: mod_base = OTHER; note = 2'-O-methyl modified nucleotide
  modified_base 88: mod_base = OTHER; note = 2'-O-methyl modified nucleotide
  modified_base 89: mod_base = OTHER; note = 2'-O-methyl modified nucleotide
  modified_base 90: mod_base = OTHER; note = 2'-O-methyl modified nucleotide
  modified_base 91: mod_base = OTHER; note = 2'-O-methyl modified nucleotide
  modified_base 92: mod_base = OTHER; note = 2'-O-methyl modified nucleotide
  modified_base 93: mod_base = OTHER; note = 2'-O-methyl modified nucleotide
  modified_base 94: mod_base = OTHER; note = 2'-O-methyl modified nucleotide
  modified_base 95: mod_base = OTHER; note = 2'-O-methyl modified nucleotide
  modified_base 96: mod_base = OTHER; note = 2'-O-methyl modified nucleotide
  modified_base 116: mod_base = OTHER; note = Nucleotide with phosphorothioate linkage
  modified_base 117: mod_base = OTHER; note = 2'-O-methyl modified nucleotide with phosphorothioate linkage
  modified_base 118: mod_base = OTHER; note = 2'-O-methyl modified nucleotide with phosphorothioate linkage
  modified_base 119: mod_base = OTHER; note = 2'-O-methyl modified nucleotide
actcacgctggatagcctccgttttagagctagaaatagcaagttaaaataaggctagtccgttatcaacttgaaaaagtggcaccgagtcggtgcgcctggataacggctatccagcg

SEQ ID NO: 17567 - RNA, 118 nt, synthetic construct
  source 1..118: mol_type = other RNA
  modified_base 1: mod_base = OTHER; note = 2'-O-methyl modified nucleotide with phosphorothioate linkage
  modified_base 2: mod_base = OTHER; note = 2'-O-methyl modified nucleotide with phosphorothioate linkage
  modified_base 3: mod_base = OTHER; note = 2'-O-methyl modified nucleotide with phosphorothioate linkage
  modified_base 29: mod_base = OTHER; note = 2'-O-methyl modified nucleotide
  modified_base 30: mod_base = OTHER; note = 2'-O-methyl modified nucleotide
  modified_base 31: mod_base = OTHER; note = 2'-O-methyl modified nucleotide
  modified_base 32: mod_base = OTHER; note = 2'-O-methyl modified nucleotide
  modified_base 33: mod_base = OTHER; note = 2'-O-methyl modified nucleotide
  modified_base 34: mod_base = OTHER; note = 2'-O-methyl modified nucleotide
  modified_base 35: mod_base = OTHER; note = 2'-O-methyl modified nucleotide
  modified_base 36: mod_base = OTHER; note = 2'-O-methyl modified nucleotide
  modified_base 37: mod_base = OTHER; note = 2'-O-methyl modified nucleotide
  modified_base 38: mod_base = OTHER; note = 2'-O-methyl modified nucleotide
  modified_base 39: mod_base = OTHER; note = 2'-O-methyl modified nucleotide
  modified_base 40: mod_base = OTHER; note = 2'-O-methyl modified nucleotide
  modified_base 69: mod_base = OTHER; note = 2'-O-methyl modified nucleotide
  modified_base 70: mod_base = OTHER; note = 2'-O-methyl modified nucleotide
  modified_base 71: mod_base = OTHER; note = 2'-O-methyl modified nucleotide
  modified_base 72: mod_base = OTHER; note = 2'-O-methyl modified nucleotide
  modified_base 73: mod_base = OTHER; note = 2'-O-methyl modified nucleotide
  modified_base 74: mod_base = OTHER; note = 2'-O-methyl modified nucleotide
  modified_base 75: mod_base = OTHER; note = 2'-O-methyl modified nucleotide
  modified_base 76: mod_base = OTHER; note = 2'-O-methyl modified nucleotide
  modified_base 77: mod_base = OTHER; note = 2'-O-methyl modified nucleotide
  modified_base 78: mod_base = OTHER; note = 2'-O-methyl modified nucleotide
  modified_base 79: mod_base = OTHER; note = 2'-O-methyl modified nucleotide
  modified_base 80: mod_base = OTHER; note = 2'-O-methyl modified nucleotide
  modified_base 81: mod_base = OTHER; note = 2'-O-methyl modified nucleotide
  modified_base 82: mod_base = OTHER; note = 2'-O-methyl modified nucleotide
  modified_base 83: mod_base = OTHER; note = 2'-O-methyl modified nucleotide
  modified_base 84: mod_base = OTHER; note = 2'-O-methyl modified nucleotide
  modified_base 85: mod_base = OTHER; note = 2'-O-methyl modified nucleotide
  modified_base 86: mod_base = OTHER; note = 2'-O-methyl modified nucleotide
  modified_base 87: mod_base = OTHER; note = 2'-O-methyl modified nucleotide
  modified_base 88: mod_base = OTHER; note = 2'-O-methyl modified nucleotide
  modified_base 89: mod_base = OTHER; note = 2'-O-methyl modified nucleotide
  modified_base 90: mod_base = OTHER; note = 2'-O-methyl modified nucleotide
  modified_base 91: mod_base = OTHER; note = 2'-O-methyl modified nucleotide
  modified_base 92: mod_base = OTHER; note = 2'-O-methyl modified nucleotide
  modified_base 93: mod_base = OTHER; note = 2'-O-methyl modified nucleotide
  modified_base 94: mod_base = OTHER; note = 2'-O-methyl modified nucleotide
  modified_base 95: mod_base = OTHER; note = 2'-O-methyl modified nucleotide
  modified_base 96: mod_base = OTHER; note = 2'-O-methyl modified nucleotide
  modified_base 115: mod_base = OTHER; note = Nucleotide with phosphorothioate linkage
  modified_base 116: mod_base = OTHER; note = 2'-O-methyl modified nucleotide with phosphorothioate linkage
  modified_base 117: mod_base = OTHER; note = 2'-O-methyl modified nucleotide with phosphorothioate linkage
  modified_base 118: mod_base = OTHER; note = 2'-O-methyl modified nucleotide
actcacgctggatagcctccgttttagagctagaaatagcaagttaaaataaggctagtccgttatcaacttgaaaaagtggcaccgagtcggtgcgcctggataacggctatccagc

SEQ ID NO: 17568 - RNA, 117 nt, synthetic construct
  source 1..117: mol_type = other RNA
  modified_base 1: mod_base = OTHER; note = 2'-O-methyl modified nucleotide with phosphorothioate linkage
  modified_base 2: mod_base = OTHER; note = 2'-O-methyl modified nucleotide with phosphorothioate linkage
  modified_base 3: mod_base = OTHER; note = 2'-O-methyl modified nucleotide with phosphorothioate linkage
  modified_base 29: mod_base = OTHER; note = 2'-O-methyl modified nucleotide
  modified_base 30: mod_base = OTHER; note = 2'-O-methyl modified nucleotide
  modified_base 31: mod_base = OTHER; note = 2'-O-methyl modified nucleotide
  modified_base 32: mod_base = OTHER; note = 2'-O-methyl modified nucleotide
  modified_base 33: mod_base = OTHER; note = 2'-O-methyl modified nucleotide
  modified_base 34: mod_base = OTHER; note = 2'-O-methyl modified nucleotide
  modified_base 35: mod_base = OTHER; note = 2'-O-methyl modified nucleotide
  modified_base 36: mod_base = OTHER; note = 2'-O-methyl modified nucleotide
  modified_base 37: mod_base = OTHER; note = 2'-O-methyl modified nucleotide
  modified_base 38: mod_base = OTHER; note = 2'-O-methyl modified nucleotide
  modified_base 39: mod_base = OTHER; note = 2'-O-methyl modified nucleotide
  modified_base 40: mod_base = OTHER; note = 2'-O-methyl modified nucleotide
  modified_base 69: mod_base = OTHER; note = 2'-O-methyl modified nucleotide
  modified_base 70: mod_base = OTHER; note = 2'-O-methyl modified nucleotide
  modified_base 71: mod_base = OTHER; note = 2'-O-methyl modified nucleotide
  modified_base 72: mod_base = OTHER; note = 2'-O-methyl modified nucleotide
  modified_base 73: mod_base = OTHER; note = 2'-O-methyl modified nucleotide
  modified_base 74: mod_base = OTHER; note = 2'-O-methyl modified nucleotide
  modified_base 75: mod_base = OTHER; note = 2'-O-methyl modified nucleotide
  modified_base 76: mod_base = OTHER; note = 2'-O-methyl modified nucleotide
  modified_base 77: mod_base = OTHER; note = 2'-O-methyl modified nucleotide
  modified_base 78: mod_base = OTHER; note = 2'-O-methyl modified nucleotide
  modified_base 79: mod_base = OTHER; note = 2'-O-methyl modified nucleotide
  modified_base 80: mod_base = OTHER; note = 2'-O-methyl modified nucleotide
  modified_base 81: mod_base = OTHER; note = 2'-O-methyl modified nucleotide
  modified_base 82: mod_base = OTHER; note = 2'-O-methyl modified nucleotide
  modified_base 83: mod_base = OTHER; note = 2'-O-methyl modified nucleotide
  modified_base 84: mod_base = OTHER; note = 2'-O-methyl modified nucleotide
  modified_base 85: mod_base = OTHER; note = 2'-O-methyl modified nucleotide
  modified_base 86: mod_base = OTHER; note = 2'-O-methyl modified nucleotide
  modified_base 87: mod_base = OTHER; note = 2'-O-methyl modified nucleotide
  modified_base 88: mod_base = OTHER; note = 2'-O-methyl modified nucleotide
  modified_base 89: mod_base = OTHER; note = 2'-O-methyl modified nucleotide
  modified_base 90: mod_base = OTHER; note = 2'-O-methyl modified nucleotide
  modified_base 91: mod_base = OTHER; note = 2'-O-methyl modified nucleotide
  modified_base 92: mod_base = OTHER; note = 2'-O-methyl modified nucleotide
  modified_base 93: mod_base = OTHER; note = 2'-O-methyl modified nucleotide
  modified_base 94: mod_base = OTHER; note = 2'-O-methyl modified nucleotide
  modified_base 95: mod_base = OTHER; note = 2'-O-methyl modified nucleotide
  modified_base 96: mod_base = OTHER; note = 2'-O-methyl modified nucleotide
  modified_base 114: mod_base = OTHER; note = Nucleotide with phosphorothioate linkage
  modified_base 115: mod_base = OTHER; note = 2'-O-methyl modified nucleotide with phosphorothioate linkage
  modified_base 116: mod_base = OTHER; note = 2'-O-methyl modified nucleotide with phosphorothioate linkage
  modified_base 117: mod_base = OTHER; note = 2'-O-methyl modified nucleotide
actcacgctggatagcctccgttttagagctagaaatagcaagttaaaataaggctagtccgttatcaacttgaaaaagtggcaccgagtcggtgcgcctggataacggctatccag

SEQ ID NO: 17569 - RNA, 116 nt, synthetic construct
  source 1..116: mol_type = other RNA
  modified_base 1: mod_base = OTHER; note = 2'-O-methyl modified nucleotide with phosphorothioate linkage
  modified_base 2: mod_base = OTHER; note = 2'-O-methyl modified nucleotide with phosphorothioate linkage
  modified_base 3: mod_base = OTHER; note = 2'-O-methyl modified nucleotide with phosphorothioate linkage
  modified_base 29: mod_base = OTHER; note = 2'-O-methyl modified nucleotide
  modified_base 30: mod_base = OTHER; note = 2'-O-methyl modified nucleotide
  modified_base 31: mod_base = OTHER; note = 2'-O-methyl modified nucleotide
  modified_base 32: mod_base = OTHER; note = 2'-O-methyl modified nucleotide
  modified_base 33: mod_base = OTHER; note = 2'-O-methyl modified nucleotide
  modified_base 34: mod_base = OTHER; note = 2'-O-methyl modified nucleotide
  modified_base 35: mod_base = OTHER; note = 2'-O-methyl modified nucleotide
  modified_base 36: mod_base = OTHER; note = 2'-O-methyl modified nucleotide
  modified_base 37: mod_base = OTHER; note = 2'-O-methyl modified nucleotide
  modified_base 38: mod_base = OTHER; note = 2'-O-methyl modified nucleotide
  modified_base 39: mod_base = OTHER; note = 2'-O-methyl modified nucleotide
  modified_base 40: mod_base = OTHER; note = 2'-O-methyl modified nucleotide
  modified_base 69: mod_base = OTHER; note = 2'-O-methyl modified nucleotide
  modified_base 70: mod_base = OTHER; note = 2'-O-methyl modified nucleotide
  modified_base 71: mod_base = OTHER; note = 2'-O-methyl modified nucleotide
  modified_base 72: mod_base = OTHER; note = 2'-O-methyl modified nucleotide
  modified_base 73: mod_base = OTHER; note = 2'-O-methyl modified nucleotide
  modified_base 74: mod_base = OTHER; note = 2'-O-methyl modified nucleotide
  modified_base 75: mod_base = OTHER; note = 2'-O-methyl modified nucleotide
  modified_base 76: mod_base = OTHER; note = 2'-O-methyl modified nucleotide
  modified_base 77: mod_base = OTHER; note = 2'-O-methyl modified nucleotide
  modified_base 78: mod_base = OTHER; note = 2'-O-methyl modified nucleotide
  modified_base 79: mod_base = OTHER; note = 2'-O-methyl modified nucleotide
  modified_base 80: mod_base = OTHER; note = 2'-O-methyl modified nucleotide
  modified_base 81: mod_base = OTHER; note = 2'-O-methyl modified nucleotide
  modified_base 82: mod_base = OTHER; note = 2'-O-methyl modified nucleotide
  modified_base 83: mod_base = OTHER; note = 2'-O-methyl modified nucleotide
  modified_base 84: mod_base = OTHER; note = 2'-O-methyl modified nucleotide
  modified_base 85: mod_base = OTHER; note = 2'-O-methyl modified nucleotide
  modified_base 86: mod_base = OTHER; note = 2'-O-methyl modified nucleotide
  modified_base 87: mod_base = OTHER; note = 2'-O-methyl modified nucleotide
  modified_base 88: mod_base = OTHER; note = 2'-O-methyl modified nucleotide
  modified_base 89: mod_base = OTHER; note = 2'-O-methyl modified nucleotide
  modified_base 90: mod_base = OTHER; note = 2'-O-methyl modified nucleotide
  modified_base 91: mod_base = OTHER; note = 2'-O-methyl modified nucleotide
  modified_base 92: mod_base = OTHER; note = 2'-O-methyl modified nucleotide
  modified_base 93: mod_base = OTHER; note = 2'-O-methyl modified nucleotide
  modified_base 94: mod_base = OTHER; note = 2'-O-methyl modified nucleotide
  modified_base 95: mod_base = OTHER; note = 2'-O-methyl modified nucleotide
  modified_base 96: mod_base = OTHER; note = 2'-O-methyl modified nucleotide
  modified_base 113: mod_base = OTHER; note = Nucleotide with phosphorothioate linkage
  modified_base 114: mod_base = OTHER; note = 2'-O-methyl modified nucleotide with phosphorothioate linkage
  modified_base 115: mod_base = OTHER; note = 2'-O-methyl modified nucleotide with phosphorothioate linkage
  modified_base 116: mod_base = OTHER; note = 2'-O-methyl modified nucleotide
actcacgctggatagcctccgttttagagctagaaatagcaagttaaaataaggctagtccgttatcaacttgaaaaagtggcaccgagtcggtgcgcctggataacggctatcca

SEQ ID NO: 17570 - RNA, 115 nt, synthetic construct
  source 1..115: mol_type = other RNA
  modified_base 1: mod_base = OTHER; note = 2'-O-methyl modified nucleotide with phosphorothioate linkage
  modified_base 2: mod_base = OTHER; note = 2'-O-methyl modified nucleotide with phosphorothioate linkage
  modified_base 3: mod_base = OTHER; note = 2'-O-methyl modified nucleotide with phosphorothioate linkage
  modified_base 29: mod_base = OTHER; note = 2'-O-methyl modified nucleotide
  modified_base 30: mod_base = OTHER; note = 2'-O-methyl modified nucleotide
  modified_base 31: mod_base = OTHER; note = 2'-O-methyl modified nucleotide
  modified_base 32: mod_base = OTHER; note = 2'-O-methyl modified nucleotide
  modified_base 33: mod_base = OTHER; note = 2'-O-methyl modified nucleotide
  modified_base 34: mod_base = OTHER; note = 2'-O-methyl modified nucleotide
  modified_base 35: mod_base = OTHER; note = 2'-O-methyl modified nucleotide
  modified_base 36: mod_base = OTHER; note = 2'-O-methyl modified nucleotide
  modified_base 37: mod_base = OTHER; note = 2'-O-methyl modified nucleotide
  modified_base 38: mod_base = OTHER; note = 2'-O-methyl modified nucleotide
  modified_base 39: mod_base = OTHER; note = 2'-O-methyl modified nucleotide
  modified_base 40: mod_base = OTHER; note = 2'-O-methyl modified nucleotide
  modified_base 69: mod_base = OTHER; note = 2'-O-methyl modified nucleotide
  modified_base 70: mod_base = OTHER; note = 2'-O-methyl modified nucleotide
  modified_base 71: mod_base = OTHER; note = 2'-O-methyl modified nucleotide
  modified_base 72: mod_base = OTHER; note = 2'-O-methyl modified nucleotide
  modified_base 73: mod_base = OTHER; note = 2'-O-methyl modified nucleotide
  modified_base 74: mod_base = OTHER; note = 2'-O-methyl modified nucleotide
  modified_base 75: mod_base = OTHER; note = 2'-O-methyl modified nucleotide
  modified_base 76: mod_base = OTHER; note = 2'-O-methyl modified nucleotide
  modified_base 77: mod_base = OTHER; note = 2'-O-methyl modified nucleotide
  modified_base 78: mod_base = OTHER; note = 2'-O-methyl modified nucleotide
  modified_base 79: mod_base = OTHER; note = 2'-O-methyl modified nucleotide
  modified_base 80: mod_base = OTHER; note = 2'-O-methyl modified nucleotide
  modified_base 81: mod_base = OTHER; note = 2'-O-methyl modified nucleotide
  modified_base 82: mod_base = OTHER; note = 2'-O-methyl modified nucleotide
  modified_base 83: mod_base = OTHER; note = 2'-O-methyl modified nucleotide
  modified_base 84: mod_base = OTHER; note = 2'-O-methyl modified nucleotide
  modified_base 85: mod_base = OTHER; note = 2'-O-methyl modified nucleotide
  modified_base 86: mod_base = OTHER; note = 2'-O-methyl modified nucleotide
  modified_base 87: mod_base = OTHER; note = 2'-O-methyl modified nucleotide
  modified_base 88: mod_base = OTHER; note = 2'-O-methyl modified nucleotide
  modified_base 89: mod_base = OTHER; note = 2'-O-methyl modified nucleotide
  modified_base 90: mod_base = OTHER; note = 2'-O-methyl modified nucleotide
  modified_base 91: mod_base = OTHER; note = 2'-O-methyl modified nucleotide
  modified_base 92: mod_base = OTHER; note = 2'-O-methyl modified nucleotide
  modified_base 93: mod_base = OTHER; note = 2'-O-methyl modified nucleotide
  modified_base 94: mod_base = OTHER; note = 2'-O-methyl modified nucleotide
  modified_base 95: mod_base = OTHER; note = 2'-O-methyl modified nucleotide
  modified_base 96: mod_base = OTHER; note = 2'-O-methyl modified nucleotide
  modified_base 112: mod_base = OTHER; note = Nucleotide with phosphorothioate linkage
  modified_base 113: mod_base = OTHER; note = 2'-O-methyl modified nucleotide with phosphorothioate linkage
  modified_base 114: mod_base = OTHER; note = 2'-O-methyl modified nucleotide with phosphorothioate linkage
  modified_base 115: mod_base = OTHER; note = 2'-O-methyl modified nucleotide
actcacgctggatagcctccgttttagagctagaaatagcaagttaaaataaggctagtccgttatcaacttgaaaaagtggcaccgagtcggtgcgcctggataacggctatcc

SEQ ID NO: 17571 - RNA, 122 nt, synthetic construct
  source 1..122: mol_type = other RNA
  modified_base 1: mod_base = OTHER; note = 2'-O-methyl modified nucleotide with phosphorothioate linkage
  modified_base 2: mod_base = OTHER; note = 2'-O-methyl modified nucleotide with phosphorothioate linkage
  modified_base 3: mod_base = OTHER; note = 2'-O-methyl modified nucleotide with phosphorothioate linkage
  modified_base 29: mod_base = OTHER; note = 2'-O-methyl modified nucleotide
  modified_base 30: mod_base = OTHER; note = 2'-O-methyl modified nucleotide
  modified_base 31: mod_base = OTHER; note = 2'-O-methyl modified nucleotide
  modified_base 32: mod_base = OTHER; note = 2'-O-methyl modified nucleotide
  modified_base 33: mod_base = OTHER; note = 2'-O-methyl modified nucleotide
  modified_base 34: mod_base = OTHER; note = 2'-O-methyl modified nucleotide
  modified_base 35: mod_base = OTHER; note = 2'-O-methyl modified nucleotide
  modified_base 36: mod_base = OTHER; note = 2'-O-methyl modified nucleotide
  modified_base 37: mod_base = OTHER; note = 2'-O-methyl modified nucleotide
  modified_base 38: mod_base = OTHER; note = 2'-O-methyl modified nucleotide
  modified_base 39: mod_base = OTHER; note = 2'-O-methyl modified nucleotide
  modified_base 40: mod_base = OTHER; note = 2'-O-methyl modified nucleotide
  modified_base 69: mod_base = OTHER; note = 2'-O-methyl modified nucleotide
  modified_base 70: mod_base = OTHER; note = 2'-O-methyl modified nucleotide
  modified_base 71: mod_base = OTHER; note = 2'-O-methyl modified nucleotide
  modified_base 72: mod_base = OTHER; note = 2'-O-methyl modified nucleotide
  modified_base 73: mod_base = OTHER; note = 2'-O-methyl modified nucleotide
  modified_base 74: mod_base = OTHER; note = 2'-O-methyl modified nucleotide
  modified_base 75: mod_base = OTHER; note = 2'-O-methyl modified nucleotide
  modified_base 76: mod_base = OTHER; note = 2'-O-methyl modified nucleotide
  modified_base 77: mod_base = OTHER; note = 2'-O-methyl modified nucleotide
  modified_base 78: mod_base = OTHER; note = 2'-O-methyl modified nucleotide
  modified_base 79: mod_base = OTHER; note = 2'-O-methyl modified nucleotide
  modified_base 80: mod_base = OTHER; note = 2'-O-methyl modified nucleotide
  modified_base 81: mod_base = OTHER; note = 2'-O-methyl modified nucleotide
  modified_base 82: mod_base = OTHER; note = 2'-O-methyl modified nucleotide
  modified_base 83: mod_base = OTHER; note = 2'-O-methyl modified nucleotide
  modified_base 84: mod_base = OTHER; note = 2'-O-methyl modified nucleotide
  modified_base 85: mod_base = OTHER; note = 2'-O-methyl modified nucleotide
  modified_base 86: mod_base = OTHER; note = 2'-O-methyl modified nucleotide
  modified_base 87: mod_base = OTHER; note = 2'-O-methyl modified nucleotide
  modified_base 88: mod_base = OTHER; note = 2'-O-methyl modified nucleotide
  modified_base 89: mod_base = OTHER; note = 2'-O-methyl modified nucleotide
  modified_base 90: mod_base = OTHER; note = 2'-O-methyl modified nucleotide
  modified_base 91: mod_base = OTHER; note = 2'-O-methyl modified nucleotide
  modified_base 92: mod_base = OTHER; note = 2'-O-methyl modified nucleotide
  modified_base 93: mod_base = OTHER; note = 2'-O-methyl modified nucleotide
  modified_base 94: mod_base = OTHER; note = 2'-O-methyl modified nucleotide
  modified_base 95: mod_base = OTHER; note = 2'-O-methyl modified nucleotide
  modified_base 96: mod_base = OTHER; note = 2'-O-methyl modified nucleotide
  modified_base 119: mod_base = OTHER; note = Nucleotide with phosphorothioate linkage
  modified_base 120: mod_base = OTHER; note = 2'-O-methyl modified nucleotide with phosphorothioate linkage
  modified_base 121: mod_base = OTHER; note = 2'-O-methyl modified nucleotide with phosphorothioate linkage
  modified_base 122: mod_base = OTHER; note = 2'-O-methyl modified nucleotide
actcacgctggatagcctccgttttagagctagaaatagcaagttaaaataaggctagtccgttatcaacttgaaaaagtggcaccgagtcggtgctggcctggataacggctatccagcgt

SEQ ID NO: 17572 - RNA, 121 nt, synthetic construct
  source 1..121: mol_type = other RNA
  modified_base 1: mod_base = OTHER; note = 2'-O-methyl modified nucleotide with phosphorothioate linkage
  modified_base 2: mod_base = OTHER; note = 2'-O-methyl modified nucleotide with phosphorothioate linkage
  modified_base 3: mod_base = OTHER; note = 2'-O-methyl modified nucleotide with phosphorothioate linkage
  modified_base 29: mod_base = OTHER; note = 2'-O-methyl modified nucleotide
  modified_base 30: mod_base = OTHER; note = 2'-O-methyl modified nucleotide
  modified_base 31: mod_base = OTHER; note = 2'-O-methyl modified nucleotide
  modified_base 32: mod_base = OTHER; note = 2'-O-methyl modified nucleotide
  modified_base 33: mod_base = OTHER; note = 2'-O-methyl modified nucleotide
  modified_base 34: mod_base = OTHER; note = 2'-O-methyl modified nucleotide
  modified_base 35: mod_base = OTHER; note = 2'-O-methyl modified nucleotide
  modified_base 36: mod_base = OTHER; note = 2'-O-methyl modified nucleotide
  modified_base 37: mod_base = OTHER; note = 2'-O-methyl modified nucleotide
  modified_base 38: mod_base = OTHER; note = 2'-O-methyl modified nucleotide
  modified_base 39: mod_base = OTHER; note = 2'-O-methyl modified nucleotide
  modified_base 40: mod_base = OTHER; note = 2'-O-methyl modified nucleotide
  modified_base 69: mod_base = OTHER; note = 2'-O-methyl modified nucleotide
  modified_base 70: mod_base = OTHER; note = 2'-O-methyl modified nucleotide
  modified_base 71: mod_base = OTHER; note = 2'-O-methyl modified nucleotide
  modified_base 72: mod_base = OTHER; note = 2'-O-methyl modified nucleotide
  modified_base 73: mod_base = OTHER; note = 2'-O-methyl modified nucleotide
  modified_base 74: mod_base = OTHER; note = 2'-O-methyl modified nucleotide
  modified_base 75: mod_base = OTHER; note = 2'-O-methyl modified nucleotide
  modified_base 76: mod_base = OTHER; note = 2'-O-methyl modified nucleotide
  modified_base 77: mod_base = OTHER; note = 2'-O-methyl modified nucleotide
  modified_base 78: mod_base = OTHER; note = 2'-O-methyl modified nucleotide
  modified_base 79: mod_base = OTHER; note = 2'-O-methyl modified nucleotide
  modified_base 80: mod_base = OTHER; note = 2'-O-methyl modified nucleotide
  modified_base 81: mod_base = OTHER; note = 2'-O-methyl modified nucleotide
  modified_base 82: mod_base = OTHER; note = 2'-O-methyl modified nucleotide
  modified_base 83: mod_base = OTHER; note = 2'-O-methyl modified nucleotide
  modified_base 84: mod_base = OTHER; note = 2'-O-methyl modified nucleotide
  modified_base 85: mod_base = OTHER; note = 2'-O-methyl modified nucleotide
  modified_base 86: mod_base = OTHER; note = 2'-O-methyl modified nucleotide
  modified_base 87: mod_base = OTHER; note = 2'-O-methyl modified nucleotide
  modified_base 88: mod_base = OTHER; note = 2'-O-methyl modified nucleotide
  modified_base 89: mod_base = OTHER; note = 2'-O-methyl modified nucleotide
  modified_base 90: mod_base = OTHER; note = 2'-O-methyl modified nucleotide
  modified_base 91: mod_base = OTHER; note = 2'-O-methyl modified nucleotide
  modified_base 92: mod_base = OTHER; note = 2'-O-methyl modified nucleotide
  modified_base 93: mod_base = OTHER; note = 2'-O-methyl modified nucleotide
  modified_base 94: mod_base = OTHER; note = 2'-O-methyl modified nucleotide
  modified_base 95: mod_base = OTHER; note = 2'-O-methyl modified nucleotide
  modified_base 96: mod_base = OTHER; note = 2'-O-methyl modified nucleotide
  modified_base 118: mod_base = OTHER; note = Nucleotide with phosphorothioate linkage
  modified_base 119: mod_base = OTHER; note = 2'-O-methyl modified nucleotide with phosphorothioate linkage
  modified_base 120: mod_base = OTHER; note = 2'-O-methyl modified nucleotide with phosphorothioate linkage
  modified_base 121: mod_base = OTHER; note = 2'-O-methyl modified nucleotide
actcacgctggatagcctccgttttagagctagaaatagcaagttaaaataaggctagtccgttatcaacttgaaaaagtggcaccgagtcggtgctggcctggataacggctatccagcg

SEQ ID NO: 17573 - RNA, 120 nt, synthetic construct
  source 1..120: mol_type = other RNA
  modified_base 1: mod_base = OTHER; note = 2'-O-methyl modified nucleotide with phosphorothioate linkage
  modified_base 2: mod_base = OTHER; note = 2'-O-methyl modified nucleotide with phosphorothioate linkage
  modified_base 3: mod_base = OTHER; note = 2'-O-methyl modified nucleotide with phosphorothioate linkage
  modified_base 29: mod_base = OTHER; note = 2'-O-methyl modified nucleotide
  modified_base 30: mod_base = OTHER; note = 2'-O-methyl modified nucleotide
  modified_base 31: mod_base = OTHER; note = 2'-O-methyl modified nucleotide
  modified_base 32: mod_base = OTHER; note = 2'-O-methyl modified nucleotide
  modified_base 33: mod_base = OTHER; note = 2'-O-methyl modified nucleotide
  modified_base 34: mod_base = OTHER; note = 2'-O-methyl modified nucleotide
  modified_base 35: mod_base = OTHER; note = 2'-O-methyl modified nucleotide
  modified_base 36: mod_base = OTHER; note = 2'-O-methyl modified nucleotide
  modified_base 37: mod_base = OTHER; note = 2'-O-methyl modified nucleotide
  modified_base 38: mod_base = OTHER; note = 2'-O-methyl modified nucleotide
  modified_base 39: mod_base = OTHER; note = 2'-O-methyl modified nucleotide
  modified_base 40: mod_base = OTHER; note = 2'-O-methyl modified nucleotide
  modified_base 69: mod_base = OTHER; note = 2'-O-methyl modified nucleotide
  modified_base 70: mod_base = OTHER; note = 2'-O-methyl modified nucleotide
  modified_base 71: mod_base = OTHER; note = 2'-O-methyl modified nucleotide
  modified_base 72: mod_base = OTHER; note = 2'-O-methyl modified nucleotide
  modified_base 73: mod_base = OTHER; note = 2'-O-methyl modified nucleotide
  modified_base 74: mod_base = OTHER; note = 2'-O-methyl modified nucleotide
  modified_base 75: mod_base = OTHER; note = 2'-O-methyl modified nucleotide
  modified_base 76: mod_base = OTHER; note = 2'-O-methyl modified nucleotide
  modified_base 77: mod_base = OTHER; note = 2'-O-methyl modified nucleotide
  modified_base 78: mod_base = OTHER; note = 2'-O-methyl modified nucleotide
  modified_base 79: mod_base = OTHER; note = 2'-O-methyl modified nucleotide
  modified_base 80: mod_base = OTHER; note = 2'-O-methyl modified nucleotide
  modified_base 81: mod_base = OTHER; note = 2'-O-methyl modified nucleotide
  modified_base 82: mod_base = OTHER; note = 2'-O-methyl modified nucleotide
  modified_base 83: mod_base = OTHER; note = 2'-O-methyl modified nucleotide
  modified_base 84: mod_base = OTHER; note = 2'-O-methyl modified nucleotide
  modified_base 85: mod_base = OTHER; note = 2'-O-methyl modified nucleotide
  modified_base 86: mod_base = OTHER; note = 2'-O-methyl modified nucleotide
  modified_base 87: mod_base = OTHER; note = 2'-O-methyl modified nucleotide
  modified_base 88: mod_base = OTHER; note = 2'-O-methyl modified nucleotide
  modified_base 89: mod_base = OTHER; note = 2'-O-methyl modified nucleotide
  modified_base 90: mod_base = OTHER; note = 2'-O-methyl modified nucleotide
  modified_base 91: mod_base = OTHER; note = 2'-O-methyl modified nucleotide
  modified_base 92: mod_base = OTHER; note = 2'-O-methyl modified nucleotide
  modified_base 93: mod_base = OTHER; note = 2'-O-methyl modified nucleotide
  modified_base 94: mod_base = OTHER; note = 2'-O-methyl modified nucleotide
  modified_base 95: mod_base = OTHER; note = 2'-O-methyl modified nucleotide
  modified_base 96: mod_base = OTHER; note = 2'-O-methyl modified nucleotide
  modified_base 117: mod_base = OTHER; note = Nucleotide with phosphorothioate linkage
  modified_base 118: mod_base = OTHER; note = 2'-O-methyl modified nucleotide with phosphorothioate linkage
  modified_base 119: mod_base = OTHER; note = 2'-O-methyl modified nucleotide with phosphorothioate linkage
  modified_base 120: mod_base = OTHER; note = 2'-O-methyl modified nucleotide
actcacgctggatagcctccgttttagagctagaaatagcaagttaaaataaggctagtccgttatcaacttgaaaaagtggcaccgagtcggtgctggcctggataacggctatccagc

SEQ ID NO: 17574 - RNA, 119 nt, synthetic construct
  source 1..119: mol_type = other RNA
  modified_base 1: mod_base = OTHER; note = 2'-O-methyl modified nucleotide with phosphorothioate linkage
  modified_base 2: mod_base = OTHER; note = 2'-O-methyl modified nucleotide with phosphorothioate linkage
  modified_base 3: mod_base = OTHER; note = 2'-O-methyl modified nucleotide with phosphorothioate linkage
  modified_base 29: mod_base = OTHER; note = 2'-O-methyl modified nucleotide
  modified_base 30: mod_base = OTHER; note = 2'-O-methyl modified nucleotide
  modified_base 31: mod_base = OTHER; note = 2'-O-methyl modified nucleotide
  modified_base 32: mod_base = OTHER; note = 2'-O-methyl modified nucleotide
  modified_base 33: mod_base = OTHER; note = 2'-O-methyl modified nucleotide
  modified_base 34: mod_base = OTHER; note = 2'-O-methyl modified nucleotide
  modified_base 35: mod_base = OTHER; note = 2'-O-methyl modified nucleotide
  modified_base 36: mod_base = OTHER; note = 2'-O-methyl modified nucleotide
  modified_base 37: mod_base = OTHER; note = 2'-O-methyl modified nucleotide
  modified_base 38: mod_base = OTHER; note = 2'-O-methyl modified nucleotide
  modified_base 39: mod_base = OTHER; note = 2'-O-methyl modified nucleotide
  modified_base 40: mod_base = OTHER; note = 2'-O-methyl modified nucleotide
  modified_base 69: mod_base = OTHER; note = 2'-O-methyl modified nucleotide
  modified_base 70: mod_base = OTHER; note = 2'-O-methyl modified nucleotide
  modified_base 71: mod_base = OTHER; note = 2'-O-methyl modified nucleotide
  modified_base 72: mod_base = OTHER; note = 2'-O-methyl modified nucleotide
  modified_base 73: mod_base = OTHER; note = 2'-O-methyl modified nucleotide
  modified_base 74: mod_base = OTHER; note = 2'-O-methyl modified nucleotide
  modified_base 75: mod_base = OTHER; note = 2'-O-methyl modified nucleotide
  modified_base 76: mod_base = OTHER; note = 2'-O-methyl modified nucleotide
  modified_base 77: mod_base = OTHER; note = 2'-O-methyl modified nucleotide
  modified_base 78: mod_base = OTHER; note = 2'-O-methyl modified nucleotide
  modified_base 79: mod_base = OTHER; note = 2'-O-methyl modified nucleotide
  modified_base 80: mod_base = OTHER; note = 2'-O-methyl modified nucleotide
  modified_base 81: mod_base = OTHER; note = 2'-O-methyl modified nucleotide
  modified_base 82: mod_base = OTHER; note = 2'-O-methyl modified nucleotide
  modified_base 83: mod_base = OTHER; note = 2'-O-methyl modified nucleotide
  modified_base 84: mod_base = OTHER; note = 2'-O-methyl modified nucleotide
  modified_base 85: mod_base = OTHER; note = 2'-O-methyl modified nucleotide
  modified_base 86: mod_base = OTHER; note = 2'-O-methyl modified nucleotide
  modified_base 87: mod_base = OTHER; note = 2'-O-methyl modified nucleotide
  modified_base 88: mod_base = OTHER; note = 2'-O-methyl modified nucleotide
  modified_base 89: mod_base = OTHER; note = 2'-O-methyl modified nucleotide
  modified_base 90: mod_base = OTHER; note = 2'-O-methyl modified nucleotide
  modified_base 91: mod_base = OTHER; note = 2'-O-methyl modified nucleotide
  modified_base 92: mod_base = OTHER; note = 2'-O-methyl modified nucleotide
  modified_base 93: mod_base = OTHER; note = 2'-O-methyl modified nucleotide
  modified_base 94: mod_base = OTHER; note = 2'-O-methyl modified nucleotide
  modified_base 95: mod_base = OTHER; note = 2'-O-methyl modified nucleotide
  modified_base 96: mod_base = OTHER; note = 2'-O-methyl modified nucleotide
  modified_base 116: mod_base = OTHER; note = Nucleotide with phosphorothioate linkage
  modified_base 117: mod_base = OTHER; note = 2'-O-methyl modified nucleotide with phosphorothioate linkage
  modified_base 118: mod_base = OTHER; note = 2'-O-methyl modified nucleotide with phosphorothioate linkage
  modified_base 119: mod_base = OTHER; note = 2'-O-methyl modified nucleotide
actcacgctggatagcctccgttttagagctagaaatagcaagttaaaataaggctagtccgttatcaacttgaaaaagtggcaccgagtcggtgctggcctggataacggctatccag

SEQ ID NO: 17575 - RNA, 118 nt, synthetic construct
  source 1..118: mol_type = other RNA
  modified_base 1: mod_base = OTHER; note = 2'-O-methyl modified nucleotide with phosphorothioate linkage
  modified_base 2: mod_base = OTHER; note = 2'-O-methyl modified nucleotide with phosphorothioate linkage
  modified_base 3: mod_base = OTHER; note = 2'-O-methyl modified nucleotide with phosphorothioate linkage
  modified_base 29: mod_base = OTHER; note = 2'-O-methyl modified nucleotide
  modified_base 30: mod_base = OTHER; note = 2'-O-methyl modified nucleotide
  modified_base 31: mod_base = OTHER; note = 2'-O-methyl modified nucleotide
  modified_base 32: mod_base = OTHER; note = 2'-O-methyl modified nucleotide
  modified_base 33: mod_base = OTHER; note = 2'-O-methyl modified nucleotide
  modified_base 34: mod_base = OTHER; note = 2'-O-methyl modified nucleotide
  modified_base 35: mod_base = OTHER; note = 2'-O-methyl modified nucleotide
  modified_base 36: mod_base = OTHER; note = 2'-O-methyl modified nucleotide
  modified_base 37: mod_base = OTHER; note = 2'-O-methyl modified nucleotide
  modified_base 38: mod_base = OTHER; note = 2'-O-methyl modified nucleotide
  modified_base 39: mod_base = OTHER; note = 2'-O-methyl modified nucleotide
  modified_base 40: mod_base = OTHER; note = 2'-O-methyl modified nucleotide
  modified_base 69: mod_base = OTHER; note = 2'-O-methyl modified nucleotide
  modified_base 70: mod_base = OTHER; note = 2'-O-methyl modified nucleotide
  modified_base 71: mod_base = OTHER; note = 2'-O-methyl modified nucleotide
  modified_base 72: mod_base = OTHER; note = 2'-O-methyl modified nucleotide
  modified_base 73: mod_base = OTHER; note = 2'-O-methyl modified nucleotide
  modified_base 74: mod_base = OTHER; note = 2'-O-methyl modified nucleotide
  modified_base 75: mod_base = OTHER; note = 2'-O-methyl modified nucleotide
  modified_base 76: mod_base = OTHER; note = 2'-O-methyl modified nucleotide
  modified_base 77: mod_base = OTHER; note = 2'-O-methyl modified nucleotide
  modified_base 78: mod_base = OTHER; note = 2'-O-methyl modified nucleotide
  modified_base 79: mod_base = OTHER; note = 2'-O-methyl modified nucleotide
  modified_base 80: mod_base = OTHER; note = 2'-O-methyl modified nucleotide
  modified_base 81: mod_base = OTHER; note = 2'-O-methyl modified nucleotide
  modified_base 82: mod_base = OTHER; note = 2'-O-methyl modified nucleotide
  modified_base 83: mod_base = OTHER; note = 2'-O-methyl modified nucleotide
  modified_base 84: mod_base = OTHER; note = 2'-O-methyl modified nucleotide
  modified_base 85: mod_base = OTHER; note = 2'-O-methyl modified nucleotide
  modified_base 86: mod_base = OTHER; note = 2'-O-methyl modified nucleotide
  modified_base 87: mod_base = OTHER; note = 2'-O-methyl modified nucleotide
  modified_base 88: mod_base = OTHER; note = 2'-O-methyl modified nucleotide
  modified_base 89: mod_base = OTHER; note = 2'-O-methyl modified nucleotide
  modified_base 90: mod_base = OTHER; note = 2'-O-methyl modified nucleotide
  modified_base 91: mod_base = OTHER; note = 2'-O-methyl modified nucleotide
  modified_base 92: mod_base = OTHER; note = 2'-O-methyl modified nucleotide
  modified_base 93: mod_base = OTHER; note = 2'-O-methyl modified nucleotide
  modified_base 94: mod_base = OTHER; note = 2'-O-methyl modified nucleotide
  modified_base 95: mod_base = OTHER; note = 2'-O-methyl modified nucleotide
  modified_base 96: mod_base = OTHER; note = 2'-O-methyl modified nucleotide
  modified_base 115: mod_base = OTHER; note = Nucleotide with phosphorothioate linkage
  modified_base 116: mod_base = OTHER; note = 2'-O-methyl modified nucleotide with phosphorothioate linkage
  modified_base 117: mod_base = OTHER; note = 2'-O-methyl modified nucleotide with phosphorothioate linkage
  modified_base 118: mod_base = OTHER; note = 2'-O-methyl modified nucleotide
actcacgctggatagcctccgttttagagctagaaatagcaagttaaaataaggctagtccgttatcaacttgaaaaagtggcaccgagtcggtgctggcctggataacggctatcca

SEQ ID NO: 17576 - RNA, 117 nt, synthetic construct
  source 1..117: mol_type = other RNA
  modified_base 1: mod_base = OTHER; note = 2'-O-methyl modified nucleotide with phosphorothioate linkage
  modified_base 2: mod_base = OTHER; note = 2'-O-methyl modified nucleotide with phosphorothioate linkage
  modified_base 3: mod_base = OTHER; note = 2'-O-methyl modified nucleotide with phosphorothioate linkage
  modified_base 29: mod_base = OTHER; note = 2'-O-methyl modified nucleotide
  modified_base 30: mod_base = OTHER; note = 2'-O-methyl modified nucleotide
  modified_base 31: mod_base = OTHER; note = 2'-O-methyl modified nucleotide
  modified_base 32: mod_base = OTHER; note = 2'-O-methyl modified nucleotide
  modified_base 33: mod_base = OTHER; note = 2'-O-methyl modified nucleotide
  modified_base 34: mod_base = OTHER; note = 2'-O-methyl modified nucleotide
  modified_base 35: mod_base = OTHER; note = 2'-O-methyl modified nucleotide
  modified_base 36: mod_base = OTHER; note = 2'-O-methyl modified nucleotide
  modified_base 37: mod_base = OTHER; note = 2'-O-methyl modified nucleotide
  modified_base 38: mod_base = OTHER; note = 2'-O-methyl modified nucleotide
  modified_base 39: mod_base = OTHER; note = 2'-O-methyl modified nucleotide
  modified_base 40: mod_base = OTHER; note = 2'-O-methyl modified nucleotide
  modified_base 69: mod_base = OTHER; note = 2'-O-methyl modified nucleotide
  modified_base 70: mod_base = OTHER; note = 2'-O-methyl modified nucleotide
  modified_base 71: mod_base = OTHER; note = 2'-O-methyl modified nucleotide
  modified_base 72: mod_base = OTHER; note = 2'-O-methyl modified nucleotide
  modified_base 73: mod_base = OTHER; note = 2'-O-methyl modified nucleotide
  modified_base 74: mod_base = OTHER; note = 2'-O-methyl modified nucleotide
  modified_base 75: mod_base = OTHER; note = 2'-O-methyl modified nucleotide
  modified_base 76: mod_base = OTHER; note = 2'-O-methyl modified nucleotide
  modified_base 77: mod_base = OTHER; note = 2'-O-methyl modified nucleotide
  modified_base 78: mod_base = OTHER; note = 2'-O-methyl modified nucleotide
  modified_base 79: mod_base = OTHER; note = 2'-O-methyl modified nucleotide
  modified_base 80: mod_base = OTHER; note = 2'-O-methyl modified nucleotide
  modified_base 81: mod_base = OTHER; note = 2'-O-methyl modified nucleotide
  modified_base 82: mod_base = OTHER; note = 2'-O-methyl modified nucleotide
  modified_base 83: mod_base = OTHER; note = 2'-O-methyl modified nucleotide
  modified_base 84: mod_base = OTHER; note = 2'-O-methyl modified nucleotide
  modified_base 85: mod_base = OTHER; note = 2'-O-methyl modified nucleotide
  modified_base 86: mod_base = OTHER; note = 2'-O-methyl modified nucleotide
  modified_base 87: mod_base = OTHER; note = 2'-O-methyl modified nucleotide
  modified_base 88: mod_base = OTHER; note = 2'-O-methyl modified nucleotide
  modified_base 89: mod_base = OTHER; note = 2'-O-methyl modified nucleotide
  modified_base 90: mod_base = OTHER; note = 2'-O-methyl modified nucleotide
  modified_base 91: mod_base = OTHER; note = 2'-O-methyl modified nucleotide
  modified_base 92: mod_base = OTHER; note = 2'-O-methyl modified nucleotide
  modified_base 93: mod_base = OTHER; note = 2'-O-methyl modified nucleotide
  modified_base 94: mod_base = OTHER; note = 2'-O-methyl modified nucleotide
  modified_base 95: mod_base = OTHER; note = 2'-O-methyl modified nucleotide
  modified_base 96: mod_base = OTHER; note = 2'-O-methyl modified nucleotide
  modified_base 114: mod_base = OTHER; note = Nucleotide with phosphorothioate linkage
  modified_base 115: mod_base = OTHER; note = 2'-O-methyl modified nucleotide with phosphorothioate linkage
  modified_base 116: mod_base = OTHER; note = 2'-O-methyl modified nucleotide with phosphorothioate linkage
  modified_base 117: mod_base = OTHER; note = 2'-O-methyl modified nucleotide
actcacgctggatagcctccgttttagagctagaaatagcaagttaaaataaggctagtccgttatcaacttgaaaaagtggcaccgagtcggtgctggcctggataacggctatcc

SEQ ID NO: 17577 - RNA, 124 nt, synthetic construct
  source 1..124: mol_type = other RNA
  modified_base 1: mod_base = OTHER; note = 2'-O-methyl modified nucleotide with phosphorothioate linkage
  modified_base 2: mod_base = OTHER; note = 2'-O-methyl modified nucleotide with phosphorothioate linkage
  modified_base 3: mod_base = OTHER; note = 2'-O-methyl modified nucleotide with phosphorothioate linkage
  modified_base 29: mod_base = OTHER; note = 2'-O-methyl modified nucleotide
  modified_base 30: mod_base = OTHER; note = 2'-O-methyl modified nucleotide
  modified_base 31: mod_base = OTHER; note = 2'-O-methyl modified nucleotide
  modified_base 32: mod_base = OTHER; note = 2'-O-methyl modified nucleotide
  modified_base 33: mod_base = OTHER; note = 2'-O-methyl modified nucleotide
  modified_base 34: mod_base = OTHER; note = 2'-O-methyl modified nucleotide
  modified_base 35: mod_base = OTHER; note = 2'-O-methyl modified nucleotide
  modified_base 36: mod_base = OTHER; note = 2'-O-methyl modified nucleotide
  modified_base 37: mod_base = OTHER; note = 2'-O-methyl modified nucleotide
  modified_base 38: mod_base = OTHER; note = 2'-O-methyl modified nucleotide
  modified_base 39: mod_base = OTHER; note = 2'-O-methyl modified nucleotide
  modified_base 40: mod_base = OTHER; note = 2'-O-methyl modified nucleotide
  modified_base 69: mod_base = OTHER; note = 2'-O-methyl modified nucleotide
  modified_base 70: mod_base = OTHER; note = 2'-O-methyl modified nucleotide
  modified_base 71: mod_base = OTHER; note = 2'-O-methyl modified nucleotide
  modified_base 72: mod_base = OTHER; note = 2'-O-methyl modified nucleotide
  modified_base 73: mod_base = OTHER; note = 2'-O-methyl modified nucleotide
  modified_base 74: mod_base = OTHER; note = 2'-O-methyl modified nucleotide
  modified_base 75: mod_base = OTHER; note = 2'-O-methyl modified nucleotide
  modified_base 76: mod_base = OTHER; note = 2'-O-methyl modified nucleotide
  modified_base 77: mod_base = OTHER; note = 2'-O-methyl modified nucleotide
  modified_base 78: mod_base = OTHER; note = 2'-O-methyl modified nucleotide
  modified_base 79: mod_base = OTHER; note = 2'-O-methyl modified nucleotide
  modified_base 80: mod_base = OTHER; note = 2'-O-methyl modified nucleotide
  modified_base 81: mod_base = OTHER; note = 2'-O-methyl modified nucleotide
  modified_base 82: mod_base = OTHER; note = 2'-O-methyl modified nucleotide
  modified_base 83: mod_base = OTHER; note = 2'-O-methyl modified nucleotide
  modified_base 84: mod_base = OTHER; note = 2'-O-methyl modified nucleotide
  modified_base 85: mod_base = OTHER; note = 2'-O-methyl modified nucleotide
  modified_base 86: mod_base = OTHER; note = 2'-O-methyl modified nucleotide
  modified_base 87: mod_base = OTHER; note = 2'-O-methyl modified nucleotide
  modified_base 88: mod_base = OTHER; note = 2'-O-methyl modified nucleotide
  modified_base 89: mod_base = OTHER; note = 2'-O-methyl modified nucleotide
  modified_base 90: mod_base = OTHER; note = 2'-O-methyl modified nucleotide
  modified_base 91: mod_base = OTHER; note = 2'-O-methyl modified nucleotide
  modified_base 92: mod_base = OTHER; note = 2'-O-methyl modified nucleotide
  modified_base 93: mod_base = OTHER; note = 2'-O-methyl modified nucleotide
  modified_base 94: mod_base = OTHER; note = 2'-O-methyl modified nucleotide
  modified_base 95: mod_base = OTHER; note = 2'-O-methyl modified nucleotide
  modified_base 96: mod_base = OTHER; note = 2'-O-methyl modified nucleotide
  modified_base 121: mod_base = OTHER; note = Nucleotide with phosphorothioate linkage
  modified_base 122: mod_base = OTHER; note = 2'-O-methyl modified nucleotide with phosphorothioate linkage
  modified_base 123: mod_base = OTHER; note = 2'-O-methyl modified nucleotide with phosphorothioate linkage
  modified_base 124: mod_base = OTHER; note = 2'-O-methyl modified nucleotide
actcacgctggatagcctccgttttagagctagaaatagcaagttaaaataaggctagtccgttatcaacttgaaaaagtggcaccgagtcggtgctctggcctggataacggctatccagcgt

SEQ ID NO: 17578 - RNA, 123 nt, synthetic construct
  source 1..123: mol_type = other RNA
  modified_base 1: mod_base = OTHER; note = 2'-O-methyl modified nucleotide with phosphorothioate linkage
  modified_base 2: mod_base = OTHER; note = 2'-O-methyl modified nucleotide with phosphorothioate linkage
  modified_base 3: mod_base = OTHER; note = 2'-O-methyl modified nucleotide with phosphorothioate linkage
  modified_base 29: mod_base = OTHER; note = 2'-O-methyl modified nucleotide
  modified_base 30: mod_base = OTHER; note = 2'-O-methyl modified nucleotide
  modified_base 31: mod_base = OTHER; note = 2'-O-methyl modified nucleotide
  modified_base 32: mod_base = OTHER; note = 2'-O-methyl modified nucleotide
  modified_base 33: mod_base = OTHER; note = 2'-O-methyl modified nucleotide
  modified_base 34: mod_base = OTHER; note = 2'-O-methyl modified nucleotide
  modified_base 35: mod_base = OTHER; note = 2'-O-methyl modified nucleotide
  modified_base 36: mod_base = OTHER; note = 2'-O-methyl modified nucleotide
  modified_base 37: mod_base = OTHER; note = 2'-O-methyl modified nucleotide
  modified_base 38: mod_base = OTHER; note = 2'-O-methyl modified nucleotide
  modified_base 39: mod_base = OTHER; note = 2'-O-methyl modified nucleotide
  modified_base 40: mod_base = OTHER; note = 2'-O-methyl modified nucleotide
  modified_base 69: mod_base = OTHER; note = 2'-O-methyl modified nucleotide
  modified_base 70: mod_base = OTHER; note = 2'-O-methyl modified nucleotide
  modified_base 71: mod_base = OTHER; note = 2'-O-methyl modified nucleotide
  modified_base 72: mod_base = OTHER; note = 2'-O-methyl modified nucleotide
  modified_base 73: mod_base = OTHER; note = 2'-O-methyl modified nucleotide
  modified_base 74: mod_base = OTHER; note = 2'-O-methyl modified nucleotide
  modified_base 75: mod_base = OTHER; note = 2'-O-methyl modified nucleotide
  modified_base 76: mod_base = OTHER; note = 2'-O-methyl modified nucleotide
  modified_base 77: mod_base = OTHER; note = 2'-O-methyl modified nucleotide
  modified_base 78: mod_base = OTHER; note = 2'-O-methyl modified nucleotide
  modified_base 79: mod_base = OTHER; note = 2'-O-methyl modified nucleotide
  modified_base 80: mod_base = OTHER; note = 2'-O-methyl modified nucleotide
  modified_base 81: mod_base = OTHER; note = 2'-O-methyl modified nucleotide
  modified_base 82: mod_base = OTHER; note = 2'-O-methyl modified nucleotide
  modified_base 83: mod_base = OTHER; note = 2'-O-methyl modified nucleotide
  modified_base 84: mod_base = OTHER; note = 2'-O-methyl modified nucleotide
  modified_base 85: mod_base = OTHER; note = 2'-O-methyl modified nucleotide
  modified_base 86: mod_base = OTHER; note = 2'-O-methyl modified nucleotide
  modified_base 87: mod_base = OTHER; note = 2'-O-methyl modified nucleotide
  modified_base 88: mod_base = OTHER; note = 2'-O-methyl modified nucleotide
  modified_base 89: mod_base = OTHER; note = 2'-O-methyl modified nucleotide
  modified_base 90: mod_base = OTHER; note = 2'-O-methyl modified nucleotide
  modified_base 91: mod_base = OTHER; note = 2'-O-methyl modified nucleotide
  modified_base 92: mod_base = OTHER; note = 2'-O-methyl modified nucleotide
  modified_base 93: mod_base = OTHER; note = 2'-O-methyl modified nucleotide
  modified_base 94: mod_base = OTHER; note = 2'-O-methyl modified nucleotide
  modified_base 95: mod_base = OTHER; note = 2'-O-methyl modified nucleotide
  modified_base 96: mod_base = OTHER; note = 2'-O-methyl modified nucleotide
  modified_base 120: mod_base = OTHER; note = Nucleotide with phosphorothioate linkage
  modified_base 121: mod_base = OTHER; note = 2'-O-methyl modified nucleotide with phosphorothioate linkage
  modified_base 122: mod_base = OTHER; note = 2'-O-methyl modified nucleotide with phosphorothioate linkage
  modified_base 123: mod_base = OTHER; note = 2'-O-methyl modified nucleotide
actcacgctggatagcctccgttttagagctagaaatagcaagttaaaataaggctagtccgttatcaacttgaaaaagtggcaccgagtcggtgctctggcctggataacggctatccagcg

SEQ ID NO: 17579 - RNA, 122 nt, synthetic construct
  source 1..122: mol_type = other RNA
  modified_base 1: mod_base = OTHER; note = 2'-O-methyl modified nucleotide with phosphorothioate linkage
  modified_base 2: mod_base = OTHER; note = 2'-O-methyl modified nucleotide with phosphorothioate linkage
  modified_base 3: mod_base = OTHER; note = 2'-O-methyl modified nucleotide with phosphorothioate linkage
  modified_base 29: mod_base = OTHER; note = 2'-O-methyl modified nucleotide
  modified_base 30: mod_base = OTHER; note = 2'-O-methyl modified nucleotide
  modified_base 31: mod_base = OTHER; note = 2'-O-methyl modified nucleotide
  modified_base 32: mod_base = OTHER; note = 2'-O-methyl modified nucleotide
  modified_base 33: mod_base = OTHER; note = 2'-O-methyl modified nucleotide
  modified_base 34: mod_base = OTHER; note = 2'-O-methyl modified nucleotide
  modified_base 35: mod_base = OTHER; note = 2'-O-methyl modified nucleotide
  modified_base 36: mod_base = OTHER; note = 2'-O-methyl modified nucleotide
  modified_base 37: mod_base = OTHER; note = 2'-O-methyl modified nucleotide
  modified_base 38: mod_base = OTHER; note = 2'-O-methyl modified nucleotide
  modified_base 39: mod_base = OTHER; note = 2'-O-methyl modified nucleotide
  modified_base 40: mod_base = OTHER; note = 2'-O-methyl modified nucleotide
  modified_base 69: mod_base = OTHER; note = 2'-O-methyl modified nucleotide
  modified_base 70: mod_base = OTHER; note = 2'-O-methyl modified nucleotide
  modified_base 71: mod_base = OTHER; note = 2'-O-methyl modified nucleotide
  modified_base 72: mod_base = OTHER; note = 2'-O-methyl modified nucleotide
  modified_base 73: mod_base = OTHER; note = 2'-O-methyl modified nucleotide
  modified_base 74: mod_base = OTHER; note = 2'-O-methyl modified nucleotide
  modified_base 75: mod_base = OTHER; note = 2'-O-methyl modified nucleotide
  modified_base 76: mod_base = OTHER; note = 2'-O-methyl modified nucleotide
  modified_base 77: mod_base = OTHER; note = 2'-O-methyl modified nucleotide
  modified_base 78: mod_base = OTHER; note = 2'-O-methyl modified nucleotide
  modified_base 79: mod_base = OTHER; note = 2'-O-methyl modified nucleotide
  modified_base 80: mod_base = OTHER; note = 2'-O-methyl modified nucleotide
  modified_base 81: mod_base = OTHER; note = 2'-O-methyl modified nucleotide
  modified_base 82: mod_base = OTHER; note = 2'-O-methyl modified nucleotide
  modified_base 83: mod_base = OTHER; note = 2'-O-methyl modified nucleotide
  modified_base 84: mod_base = OTHER; note = 2'-O-methyl modified nucleotide
  modified_base 85: mod_base = OTHER; note = 2'-O-methyl modified nucleotide
  modified_base 86: mod_base = OTHER; note = 2'-O-methyl modified nucleotide
  modified_base 87: mod_base = OTHER; note = 2'-O-methyl modified nucleotide
  modified_base 88: mod_base = OTHER; note = 2'-O-methyl modified nucleotide
  modified_base 89: mod_base = OTHER; note = 2'-O-methyl modified nucleotide
  modified_base 90: mod_base = OTHER; note = 2'-O-methyl modified nucleotide
  modified_base 91: mod_base = OTHER; note = 2'-O-methyl modified nucleotide
  modified_base 92: mod_base = OTHER; note = 2'-O-methyl modified nucleotide
  modified_base 93: mod_base = OTHER; note = 2'-O-methyl modified nucleotide
  modified_base 94: mod_base = OTHER; note = 2'-O-methyl modified nucleotide
  modified_base 95: mod_base = OTHER; note = 2'-O-methyl modified nucleotide
  modified_base 96: mod_base = OTHER; note = 2'-O-methyl modified nucleotide
  modified_base 119: mod_base = OTHER; note = Nucleotide with phosphorothioate linkage
  modified_base 120: mod_base = OTHER; note = 2'-O-methyl modified nucleotide with phosphorothioate linkage
  modified_base 121: mod_base = OTHER; note = 2'-O-methyl modified nucleotide with phosphorothioate linkage
  modified_base 122: mod_base = OTHER; note = 2'-O-methyl modified nucleotide
actcacgctggatagcctccgttttagagctagaaatagcaagttaaaataaggctagtccgttatcaacttgaaaaagtggcaccgagtcggtgctctggcctggataacggctatccagc

SEQ ID NO: 17580 - RNA, 121 nt, synthetic construct
  source 1..121: mol_type = other RNA
  modified_base 1: mod_base = OTHER; note = 2'-O-methyl modified nucleotide with phosphorothioate linkage
  modified_base 2: mod_base = OTHER; note = 2'-O-methyl modified nucleotide with phosphorothioate linkage
  modified_base 3: mod_base = OTHER; note = 2'-O-methyl modified nucleotide with phosphorothioate linkage
  modified_base 29: mod_base = OTHER; note = 2'-O-methyl modified nucleotide
  modified_base 30: mod_base = OTHER; note = 2'-O-methyl modified nucleotide
  modified_base 31: mod_base = OTHER; note = 2'-O-methyl modified nucleotide
  modified_base 32: mod_base = OTHER; note = 2'-O-methyl modified nucleotide
  modified_base 33: mod_base = OTHER; note = 2'-O-methyl modified nucleotide
  modified_base 34: mod_base = OTHER; note = 2'-O-methyl modified nucleotide
  modified_base 35: mod_base = OTHER; note = 2'-O-methyl modified nucleotide
  modified_base 36: mod_base = OTHER; note = 2'-O-methyl modified nucleotide
  modified_base 37: mod_base = OTHER; note = 2'-O-methyl modified nucleotide
  modified_base 38: mod_base = OTHER; note = 2'-O-methyl modified nucleotide
  modified_base 39: mod_base = OTHER; note = 2'-O-methyl modified nucleotide
  modified_base 40: mod_base = OTHER; note = 2'-O-methyl modified nucleotide
  modified_base 69: mod_base = OTHER; note = 2'-O-methyl modified nucleotide
  modified_base 70: mod_base = OTHER; note = 2'-O-methyl modified nucleotide
  modified_base 71: mod_base = OTHER; note = 2'-O-methyl modified nucleotide
  modified_base 72: mod_base = OTHER; note = 2'-O-methyl modified nucleotide
  modified_base 73: mod_base = OTHER; note = 2'-O-methyl modified nucleotide
  modified_base 74: mod_base = OTHER; note = 2'-O-methyl modified nucleotide
  modified_base 75: mod_base = OTHER; note = 2'-O-methyl modified nucleotide
  modified_base 76: mod_base = OTHER; note = 2'-O-methyl modified nucleotide
  modified_base 77: mod_base = OTHER; note = 2'-O-methyl modified nucleotide
  modified_base 78: mod_base = OTHER; note = 2'-O-methyl modified nucleotide
  modified_base 79: mod_base = OTHER; note = 2'-O-methyl modified nucleotide
  modified_base 80: mod_base = OTHER; note = 2'-O-methyl modified nucleotide
  modified_base 81: mod_base = OTHER; note = 2'-O-methyl modified nucleotide
  modified_base 82: mod_base = OTHER; note = 2'-O-methyl modified nucleotide
  modified_base 83: mod_base = OTHER; note = 2'-O-methyl modified nucleotide
  modified_base 84: mod_base = OTHER; note = 2'-O-methyl modified nucleotide
  modified_base 85: mod_base = OTHER; note = 2'-O-methyl modified nucleotide
  modified_base 86: mod_base = OTHER; note = 2'-O-methyl modified nucleotide
  modified_base 87: mod_base = OTHER; note = 2'-O-methyl modified nucleotide
  modified_base 88: mod_base = OTHER; note = 2'-O-methyl modified nucleotide
  modified_base 89: mod_base = OTHER; note = 2'-O-methyl modified nucleotide
  modified_base 90: mod_base = OTHER; note = 2'-O-methyl modified nucleotide
  modified_base 91: mod_base = OTHER; note = 2'-O-methyl modified nucleotide
  modified_base 92: mod_base = OTHER; note = 2'-O-methyl modified nucleotide
  modified_base 93: mod_base = OTHER; note = 2'-O-methyl modified nucleotide
  modified_base 94: mod_base = OTHER; note = 2'-O-methyl modified nucleotide
  modified_base 95: mod_base = OTHER; note = 2'-O-methyl modified nucleotide
  modified_base 96: mod_base = OTHER; note = 2'-O-methyl modified nucleotide
  modified_base 118: mod_base = OTHER; note = Nucleotide with phosphorothioate linkage
  modified_base 119: mod_base = OTHER; note = 2'-O-methyl modified nucleotide with phosphorothioate linkage
  modified_base 120: mod_base = OTHER; note = 2'-O-methyl modified nucleotide with phosphorothioate linkage
  modified_base 121: mod_base = OTHER; note = 2'-O-methyl modified nucleotide
actcacgctggatagcctccgttttagagctagaaatagcaagttaaaataaggctagtccgttatcaacttgaaaaagtggcaccgagtcggtgctctggcctggataacggctatccag

SEQ ID NO: 17581 - RNA, 120 nt, synthetic construct
  source 1..120: mol_type = other RNA
  modified_base 1: mod_base = OTHER; note = 2'-O-methyl modified nucleotide with phosphorothioate linkage
  modified_base 2: mod_base = OTHER; note = 2'-O-methyl modified nucleotide with phosphorothioate linkage
  modified_base 3: mod_base = OTHER; note = 2'-O-methyl modified nucleotide with phosphorothioate linkage
  modified_base 29: mod_base = OTHER; note = 2'-O-methyl modified nucleotide
  modified_base 30: mod_base = OTHER; note = 2'-O-methyl modified nucleotide
  modified_base 31: mod_base = OTHER; note = 2'-O-methyl modified nucleotide
  modified_base 32: mod_base = OTHER; note = 2'-O-methyl modified nucleotide
  modified_base 33: mod_base = OTHER; note = 2'-O-methyl modified nucleotide
  modified_base 34: mod_base = OTHER; note = 2'-O-methyl modified nucleotide
  modified_base 35: mod_base = OTHER; note = 2'-O-methyl modified nucleotide
  modified_base 36: mod_base = OTHER; note = 2'-O-methyl modified nucleotide
  modified_base 37: mod_base = OTHER; note = 2'-O-methyl modified nucleotide
  modified_base 38: mod_base = OTHER; note = 2'-O-methyl modified nucleotide
  modified_base 39: mod_base = OTHER; note = 2'-O-methyl modified nucleotide
  modified_base 40: mod_base = OTHER; note = 2'-O-methyl modified nucleotide
  modified_base 69: mod_base = OTHER; note = 2'-O-methyl modified nucleotide
  modified_base 70: mod_base = OTHER; note = 2'-O-methyl modified nucleotide
  modified_base 71: mod_base = OTHER; note = 2'-O-methyl modified nucleotide
  modified_base 72: mod_base = OTHER; note = 2'-O-methyl modified nucleotide
  modified_base 73: mod_base = OTHER; note = 2'-O-methyl modified nucleotide
  modified_base 74: mod_base = OTHER; note = 2'-O-methyl modified nucleotide
  modified_base 75: mod_base = OTHER; note = 2'-O-methyl modified nucleotide
  modified_base 76: mod_base = OTHER; note = 2'-O-methyl modified nucleotide
  modified_base 77: mod_base = OTHER; note = 2'-O-methyl modified nucleotide
  modified_base 78: mod_base = OTHER; note = 2'-O-methyl modified nucleotide
  modified_base 79: mod_base = OTHER; note = 2'-O-methyl modified nucleotide
  modified_base 80: mod_base = OTHER; note = 2'-O-methyl modified nucleotide
  modified_base 81: mod_base = OTHER; note = 2'-O-methyl modified nucleotide
  modified_base 82: mod_base = OTHER; note = 2'-O-methyl modified nucleotide
  modified_base 83: mod_base = OTHER; note = 2'-O-methyl modified nucleotide
  modified_base 84: mod_base = OTHER; note = 2'-O-methyl modified nucleotide
  modified_base 85: mod_base = OTHER; note = 2'-O-methyl modified nucleotide
  modified_base 86: mod_base = OTHER; note = 2'-O-methyl modified nucleotide
  modified_base 87: mod_base = OTHER; note = 2'-O-methyl modified nucleotide
  modified_base 88: mod_base = OTHER; note = 2'-O-methyl modified nucleotide
  modified_base 89: mod_base = OTHER; note = 2'-O-methyl modified nucleotide
  modified_base 90: mod_base = OTHER; note = 2'-O-methyl modified nucleotide
  modified_base 91: mod_base = OTHER; note = 2'-O-methyl modified nucleotide
  modified_base 92: mod_base = OTHER; note = 2'-O-methyl modified nucleotide
  modified_base 93: mod_base = OTHER; note = 2'-O-methyl modified nucleotide
  modified_base 94: mod_base = OTHER; note = 2'-O-methyl modified nucleotide
  modified_base 95: mod_base = OTHER; note = 2'-O-methyl modified nucleotide
  modified_base 96: mod_base = OTHER; note = 2'-O-methyl modified nucleotide
  modified_base 117: mod_base = OTHER; note = Nucleotide with phosphorothioate linkage
  modified_base 118: mod_base = OTHER; note = 2'-O-methyl modified nucleotide with phosphorothioate linkage
  modified_base 119: mod_base = OTHER; note = 2'-O-methyl modified nucleotide with phosphorothioate linkage
  modified_base 120: mod_base = OTHER; note = 2'-O-methyl modified nucleotide
actcacgctggatagcctccgttttagagctagaaatagcaagttaaaataaggctagtccgttatcaacttgaaaaagtggcaccgagtcggtgctctggcctggataacggctatcca

SEQ ID NO: 17582 - RNA, 119 nt, synthetic construct
  source 1..119: mol_type = other RNA
  modified_base 1: mod_base = OTHER; note = 2'-O-methyl modified nucleotide with phosphorothioate linkage
  modified_base 2: mod_base = OTHER; note = 2'-O-methyl modified nucleotide with phosphorothioate linkage
  modified_base 3: mod_base = OTHER; note = 2'-O-methyl modified nucleotide with phosphorothioate linkage
  modified_base 29: mod_base = OTHER; note = 2'-O-methyl modified nucleotide
  modified_base 30: mod_base = OTHER; note = 2'-O-methyl modified nucleotide
  modified_base 31: mod_base = OTHER; note = 2'-O-methyl modified nucleotide
  modified_base 32: mod_base = OTHER; note = 2'-O-methyl modified nucleotide
  modified_base 33: mod_base = OTHER; note = 2'-O-methyl modified nucleotide
  modified_base 34: mod_base = OTHER; note = 2'-O-methyl modified nucleotide
  modified_base 35: mod_base = OTHER; note = 2'-O-methyl modified nucleotide
  modified_base 36: mod_base = OTHER; note = 2'-O-methyl modified nucleotide
  modified_base 37: mod_base = OTHER; note = 2'-O-methyl modified nucleotide
  modified_base 38: mod_base = OTHER; note = 2'-O-methyl modified nucleotide
  modified_base 39: mod_base = OTHER; note = 2'-O-methyl modified nucleotide
  modified_base 40: mod_base = OTHER; note = 2'-O-methyl modified nucleotide
  modified_base 69: mod_base = OTHER; note = 2'-O-methyl modified nucleotide
  modified_base 70: mod_base = OTHER; note = 2'-O-methyl modified nucleotide
  modified_base 71: mod_base = OTHER; note = 2'-O-methyl modified nucleotide
  modified_base 72: mod_base = OTHER; note = 2'-O-methyl modified nucleotide
  modified_base 73: mod_base = OTHER; note = 2'-O-methyl modified nucleotide
  modified_base 74: mod_base = OTHER; note = 2'-O-methyl modified nucleotide
  modified_base 75: mod_base = OTHER; note = 2'-O-methyl modified nucleotide
  modified_base 76: mod_base = OTHER; note = 2'-O-methyl modified nucleotide
  modified_base 77: mod_base = OTHER; note = 2'-O-methyl modified nucleotide
  modified_base 78: mod_base = OTHER; note = 2'-O-methyl modified nucleotide
  modified_base 79: mod_base = OTHER; note = 2'-O-methyl modified nucleotide
  modified_base 80: mod_base = OTHER; note = 2'-O-methyl modified nucleotide
  modified_base 81: mod_base = OTHER; note = 2'-O-methyl modified nucleotide
  modified_base 82: mod_base = OTHER; note = 2'-O-methyl modified nucleotide
  modified_base 83: mod_base = OTHER; note = 2'-O-methyl modified nucleotide
  modified_base 84: mod_base = OTHER; note = 2'-O-methyl modified nucleotide
  modified_base 85: mod_base = OTHER; note = 2'-O-methyl modified nucleotide
  modified_base 86: mod_base = OTHER; note = 2'-O-methyl modified nucleotide
  modified_base 87: mod_base = OTHER; note = 2'-O-methyl modified nucleotide
  modified_base 88: mod_base = OTHER; note = 2'-O-methyl modified nucleotide
  modified_base 89: mod_base = OTHER; note = 2'-O-methyl modified nucleotide
  modified_base 90: mod_base = OTHER; note = 2'-O-methyl modified nucleotide
  modified_base 91: mod_base = OTHER; note = 2'-O-methyl modified nucleotide
  modified_base 92: mod_base = OTHER; note = 2'-O-methyl modified nucleotide
  modified_base 93: mod_base = OTHER; note = 2'-O-methyl modified nucleotide
  modified_base 94: mod_base = OTHER; note = 2'-O-methyl modified nucleotide
  modified_base 95: mod_base = OTHER; note = 2'-O-methyl modified nucleotide
  modified_base 96: mod_base = OTHER; note = 2'-O-methyl modified nucleotide
  modified_base 116: mod_base = OTHER; note = Nucleotide with phosphorothioate linkage
  modified_base 117: mod_base = OTHER; note = 2'-O-methyl modified nucleotide with phosphorothioate linkage
  modified_base 118: mod_base = OTHER; note = 2'-O-methyl modified nucleotide with phosphorothioate linkage
  modified_base 119: mod_base = OTHER; note = 2'-O-methyl modified nucleotide
actcacgctggatagcctccgttttagagctagaaatagcaagttaaaataaggctagtccgttatcaacttgaaaaagtggcaccgagtcggtgctctggcctggataacggctatcc

SEQ ID NO: 17583 - RNA, 126 nt, synthetic construct
  source 1..126: mol_type = other RNA
  modified_base 1: mod_base = OTHER; note = 2'-O-methyl modified nucleotide with phosphorothioate linkage
  modified_base 2: mod_base = OTHER; note = 2'-O-methyl modified nucleotide with phosphorothioate linkage
  modified_base 3: mod_base = OTHER; note = 2'-O-methyl modified nucleotide with phosphorothioate linkage
  modified_base 29: mod_base = OTHER; note = 2'-O-methyl modified nucleotide
  modified_base 30: mod_base = OTHER; note = 2'-O-methyl modified nucleotide
  modified_base 31: mod_base = OTHER; note = 2'-O-methyl modified nucleotide
  modified_base 32: mod_base = OTHER; note = 2'-O-methyl modified nucleotide
  modified_base 33: mod_base = OTHER; note = 2'-O-methyl modified nucleotide
  modified_base 34: mod_base = OTHER; note = 2'-O-methyl modified nucleotide
  modified_base 35: mod_base = OTHER; note = 2'-O-methyl modified nucleotide
  modified_base 36: mod_base = OTHER; note = 2'-O-methyl modified nucleotide
  modified_base 37: mod_base = OTHER; note = 2'-O-methyl modified nucleotide
  modified_base 38: mod_base = OTHER; note = 2'-O-methyl modified nucleotide
  modified_base 39: mod_base = OTHER; note = 2'-O-methyl modified nucleotide
  modified_base 40: mod_base = OTHER; note = 2'-O-methyl modified nucleotide
  modified_base 69: mod_base = OTHER; note = 2'-O-methyl modified nucleotide
  modified_base 70: mod_base = OTHER; note = 2'-O-methyl modified nucleotide
  modified_base 71: mod_base = OTHER; note = 2'-O-methyl modified nucleotide
  modified_base 72: mod_base = OTHER; note = 2'-O-methyl modified nucleotide
  modified_base 73: mod_base = OTHER; note = 2'-O-methyl modified nucleotide
  modified_base 74: mod_base = OTHER; note = 2'-O-methyl modified nucleotide
  modified_base 75: mod_base = OTHER; note = 2'-O-methyl modified nucleotide
  modified_base 76: mod_base = OTHER; note = 2'-O-methyl modified nucleotide
  modified_base 77: mod_base = OTHER; note = 2'-O-methyl modified nucleotide
  modified_base 78: mod_base = OTHER; note = 2'-O-methyl modified nucleotide
  modified_base 79: mod_base = OTHER; note = 2'-O-methyl modified nucleotide
  modified_base 80: mod_base = OTHER; note = 2'-O-methyl modified nucleotide
  modified_base 81: mod_base = OTHER; note = 2'-O-methyl modified nucleotide
  modified_base 82: mod_base = OTHER; note = 2'-O-methyl modified nucleotide
  modified_base 83: mod_base = OTHER; note = 2'-O-methyl modified nucleotide
  modified_base 84: mod_base = OTHER; note = 2'-O-methyl modified nucleotide
  modified_base 85: mod_base = OTHER; note = 2'-O-methyl modified nucleotide
  modified_base 86: mod_base = OTHER; note = 2'-O-methyl modified nucleotide
  modified_base 87: mod_base = OTHER; note = 2'-O-methyl modified nucleotide
  modified_base 88: mod_base = OTHER; note = 2'-O-methyl modified nucleotide
  modified_base 89: mod_base = OTHER; note = 2'-O-methyl modified nucleotide
  modified_base 90: mod_base = OTHER; note = 2'-O-methyl modified nucleotide
  modified_base 91: mod_base = OTHER; note = 2'-O-methyl modified nucleotide
  modified_base 92: mod_base = OTHER; note = 2'-O-methyl modified nucleotide
  modified_base 93: mod_base = OTHER; note = 2'-O-methyl modified nucleotide
  modified_base 94: mod_base = OTHER; note = 2'-O-methyl modified nucleotide
  modified_base 95: mod_base = OTHER; note = 2'-O-methyl modified nucleotide
  modified_base 96: mod_base = OTHER; note = 2'-O-methyl modified nucleotide
  modified_base 123: mod_base = OTHER; note = Nucleotide with phosphorothioate linkage
  modified_base 124: mod_base = OTHER; note = 2'-O-methyl modified nucleotide with phosphorothioate linkage
  modified_base 125: mod_base = OTHER; note = 2'-O-methyl modified nucleotide with phosphorothioate linkage
  modified_base 126: mod_base = OTHER; note = 2'-O-methyl modified nucleotide
actcacgctggatagcctccgttttagagctagaaatagcaagttaaaataaggctagtccgttatcaacttgaaaaagtggcaccgagtcggtgctttctggcctggataacggctatccagcgt

SEQ ID NO: 17584 - RNA, 125 nt, synthetic construct
  source 1..125: mol_type = other RNA
  modified_base 1: mod_base = OTHER; note = 2'-O-methyl modified nucleotide with phosphorothioate linkage
  modified_base 2: mod_base = OTHER; note = 2'-O-methyl modified nucleotide with phosphorothioate linkage
  modified_base 3: mod_base = OTHER; note = 2'-O-methyl modified nucleotide with phosphorothioate linkage
  modified_base 29: mod_base = OTHER; note = 2'-O-methyl modified nucleotide
  modified_base 30: mod_base = OTHER; note = 2'-O-methyl modified nucleotide
  modified_base 31: mod_base = OTHER; note = 2'-O-methyl modified nucleotide
  modified_base 32: mod_base = OTHER; note = 2'-O-methyl modified nucleotide
  modified_base 33: mod_base = OTHER; note = 2'-O-methyl modified nucleotide
  modified_base 34: mod_base = OTHER; note = 2'-O-methyl modified nucleotide
  modified_base 35: mod_base = OTHER; note = 2'-O-methyl modified nucleotide
  modified_base 36: mod_base = OTHER; note = 2'-O-methyl modified nucleotide
  modified_base 37: mod_base = OTHER; note = 2'-O-methyl modified nucleotide
  modified_base 38: mod_base = OTHER; note = 2'-O-methyl modified nucleotide
  modified_base 39: mod_base = OTHER; note = 2'-O-methyl modified nucleotide
  modified_base 40: mod_base = OTHER; note = 2'-O-methyl modified nucleotide
  modified_base 69: mod_base = OTHER; note = 2'-O-methyl modified nucleotide
  modified_base 70: mod_base = OTHER; note = 2'-O-methyl modified nucleotide
  modified_base 71: mod_base = OTHER; note = 2'-O-methyl modified nucleotide
  modified_base 72: mod_base = OTHER; note = 2'-O-methyl modified nucleotide
  modified_base 73: mod_base = OTHER; note = 2'-O-methyl modified nucleotide
  modified_base 74: mod_base = OTHER; note = 2'-O-methyl modified nucleotide
  modified_base 75: mod_base = OTHER; note = 2'-O-methyl modified nucleotide
  modified_base 76: mod_base = OTHER; note = 2'-O-methyl modified nucleotide
  modified_base 77: mod_base = OTHER; note = 2'-O-methyl modified nucleotide
  modified_base 78: mod_base = OTHER; note = 2'-O-methyl modified nucleotide
  modified_base 79: mod_base = OTHER; note = 2'-O-methyl modified nucleotide
  modified_base 80: mod_base = OTHER; note = 2'-O-methyl modified nucleotide
  modified_base 81: mod_base = OTHER; note = 2'-O-methyl modified nucleotide
  modified_base 82: mod_base = OTHER; note = 2'-O-methyl modified nucleotide
  modified_base 83: mod_base = OTHER; note = 2'-O-methyl modified nucleotide
  modified_base 84: mod_base = OTHER; note = 2'-O-methyl modified nucleotide
  modified_base 85: mod_base = OTHER; note = 2'-O-methyl modified nucleotide
  modified_base 86: mod_base = OTHER; note = 2'-O-methyl modified nucleotide
  modified_base 87: mod_base = OTHER; note = 2'-O-methyl modified nucleotide
  modified_base 88: mod_base = OTHER; note = 2'-O-methyl modified nucleotide
  modified_base 89: mod_base = OTHER; note = 2'-O-methyl modified nucleotide
  modified_base 90: mod_base = OTHER; note = 2'-O-methyl modified nucleotide
  modified_base 91: mod_base = OTHER; note = 2'-O-methyl modified nucleotide
  modified_base 92: mod_base = OTHER; note = 2'-O-methyl modified nucleotide
  modified_base 93: mod_base = OTHER; note = 2'-O-methyl modified nucleotide
  modified_base 94: mod_base = OTHER; note = 2'-O-methyl modified nucleotide
  modified_base 95: mod_base = OTHER; note = 2'-O-methyl modified nucleotide
  modified_base 96: mod_base = OTHER; note = 2'-O-methyl modified nucleotide
  modified_base 122: mod_base = OTHER; note = Nucleotide with phosphorothioate linkage
  modified_base 123: mod_base = OTHER; note = 2'-O-methyl modified nucleotide with phosphorothioate linkage
  modified_base 124: mod_base = OTHER; note = 2'-O-methyl modified nucleotide with phosphorothioate linkage
  modified_base 125: mod_base = OTHER; note = 2'-O-methyl modified nucleotide
actcacgctggatagcctccgttttagagctagaaatagcaagttaaaataaggctagtccgttatcaacttgaaaaagtggcaccgagtcggtgctttctggcctggataacggctatccagcg

SEQ ID NO: 17585 - RNA, 124 nt, synthetic construct
  source 1..124: mol_type = other RNA
  modified_base 1: mod_base = OTHER; note = 2'-O-methyl modified nucleotide with phosphorothioate linkage
  modified_base 2: mod_base = OTHER; note = 2'-O-methyl modified nucleotide with phosphorothioate linkage
  modified_base 3: mod_base = OTHER; note = 2'-O-methyl modified nucleotide with phosphorothioate linkage
  modified_base 29: mod_base = OTHER; note = 2'-O-methyl modified nucleotide
  modified_base 30: mod_base = OTHER; note = 2'-O-methyl modified nucleotide
  modified_base 31: mod_base = OTHER; note = 2'-O-methyl modified nucleotide
  modified_base 32: mod_base = OTHER; note = 2'-O-methyl modified nucleotide
  modified_base 33: mod_base = OTHER; note = 2'-O-methyl modified nucleotide
  modified_base 34: mod_base = OTHER; note = 2'-O-methyl modified nucleotide
  modified_base 35: mod_base = OTHER; note = 2'-O-methyl modified nucleotide
  modified_base 36: mod_base = OTHER; note = 2'-O-methyl modified nucleotide
  modified_base 37: mod_base = OTHER; note = 2'-O-methyl modified nucleotide
  modified_base 38: mod_base = OTHER; note = 2'-O-methyl modified nucleotide
  modified_base 39: mod_base = OTHER; note = 2'-O-methyl modified nucleotide
  modified_base 40: mod_base = OTHER; note = 2'-O-methyl modified nucleotide
  modified_base 69: mod_base = OTHER; note = 2'-O-methyl modified nucleotide
  modified_base 70: mod_base = OTHER; note = 2'-O-methyl modified nucleotide
  modified_base 71: mod_base = OTHER; note = 2'-O-methyl modified nucleotide
  modified_base 72: mod_base = OTHER; note = 2'-O-methyl modified nucleotide
  modified_base 73: mod_base = OTHER; note = 2'-O-methyl modified nucleotide
  modified_base 74: mod_base = OTHER; note = 2'-O-methyl modified nucleotide
  modified_base 75: mod_base = OTHER; note = 2'-O-methyl modified nucleotide
  modified_base 76: mod_base = OTHER; note = 2'-O-methyl modified nucleotide
  modified_base 77: mod_base = OTHER; note = 2'-O-methyl modified nucleotide
  modified_base 78: mod_base = OTHER; note = 2'-O-methyl modified nucleotide
  modified_base 79: mod_base = OTHER; note = 2'-O-methyl modified nucleotide
  modified_base 80: mod_base = OTHER; note = 2'-O-methyl modified nucleotide
  modified_base 81: mod_base = OTHER; note = 2'-O-methyl modified nucleotide
  modified_base 82: mod_base = OTHER; note = 2'-O-methyl modified nucleotide
  modified_base 83: mod_base = OTHER; note = 2'-O-methyl modified nucleotide
  modified_base 84: mod_base = OTHER; note = 2'-O-methyl modified nucleotide
  modified_base 85: mod_base = OTHER; note = 2'-O-methyl modified nucleotide
  modified_base 86: mod_base = OTHER; note = 2'-O-methyl modified nucleotide
  modified_base 87: mod_base = OTHER; note = 2'-O-methyl modified nucleotide
  modified_base 88: mod_base = OTHER; note = 2'-O-methyl modified nucleotide
  modified_base 89: mod_base = OTHER; note = 2'-O-methyl modified nucleotide
  modified_base 90: mod_base = OTHER; note = 2'-O-methyl modified nucleotide
  modified_base 91: mod_base = OTHER; note = 2'-O-methyl modified nucleotide
  modified_base 92: mod_base = OTHER; note = 2'-O-methyl modified nucleotide
  modified_base 93: mod_base = OTHER; note = 2'-O-methyl modified nucleotide
  modified_base 94: mod_base = OTHER; note = 2'-O-methyl modified nucleotide
  modified_base 95: mod_base = OTHER; note = 2'-O-methyl modified nucleotide
  modified_base 96: mod_base = OTHER; note = 2'-O-methyl modified nucleotide
  modified_base 121: mod_base = OTHER; note = Nucleotide with phosphorothioate linkage
  modified_base 122: mod_base = OTHER; note = 2'-O-methyl modified nucleotide with phosphorothioate linkage
  modified_base 123: mod_base = OTHER; note = 2'-O-methyl modified nucleotide with phosphorothioate linkage
  modified_base 124: mod_base = OTHER; note = 2'-O-methyl modified nucleotide
actcacgctggatagcctccgttttagagctagaaatagcaagttaaaataaggctagtccgttatcaacttgaaaaagtggcaccgagtcggtgctttctggcctggataacggctatccagc

SEQ ID NO: 17586 - RNA, 123 nt, synthetic construct
  source 1..123: mol_type = other RNA
  modified_base 1: mod_base = OTHER; note = 2'-O-methyl modified nucleotide with phosphorothioate linkage
  modified_base 2: mod_base = OTHER; note = 2'-O-methyl modified nucleotide with phosphorothioate linkage
  modified_base 3: mod_base = OTHER; note = 2'-O-methyl modified nucleotide with phosphorothioate linkage
  modified_base 29: mod_base = OTHER; note = 2'-O-methyl modified nucleotide
  modified_base 30: mod_base = OTHER; note = 2'-O-methyl modified nucleotide
  modified_base 31: mod_base = OTHER; note = 2'-O-methyl modified nucleotide
  modified_base 32: mod_base = OTHER; note = 2'-O-methyl modified nucleotide
  modified_base 33: mod_base = OTHER; note = 2'-O-methyl modified nucleotide
  modified_base 34: mod_base = OTHER; note = 2'-O-methyl modified nucleotide
  modified_base 35: mod_base = OTHER; note = 2'-O-methyl modified nucleotide
  modified_base 36: mod_base = OTHER; note = 2'-O-methyl modified nucleotide
  modified_base 37: mod_base = OTHER; note = 2'-O-methyl modified nucleotide
  modified_base 38: mod_base = OTHER; note = 2'-O-methyl modified nucleotide
  modified_base 39: mod_base = OTHER; note = 2'-O-methyl modified nucleotide
  modified_base 40: mod_base = OTHER; note = 2'-O-methyl modified nucleotide
  modified_base 69: mod_base = OTHER; note = 2'-O-methyl modified nucleotide
  modified_base 70: mod_base = OTHER; note = 2'-O-methyl modified nucleotide
  modified_base 71: mod_base = OTHER; note = 2'-O-methyl modified nucleotide
  modified_base 72: mod_base = OTHER; note = 2'-O-methyl modified nucleotide
  modified_base 73: mod_base = OTHER; note = 2'-O-methyl modified nucleotide
  modified_base 74: mod_base = OTHER; note = 2'-O-methyl modified nucleotide
  modified_base 75: mod_base = OTHER; note = 2'-O-methyl modified nucleotide
  modified_base 76: mod_base = OTHER; note = 2'-O-methyl modified nucleotide
  modified_base 77: mod_base = OTHER; note = 2'-O-methyl modified nucleotide
  modified_base 78: mod_base = OTHER; note = 2'-O-methyl modified nucleotide
  modified_base 79: mod_base = OTHER; note = 2'-O-methyl modified nucleotide
  modified_base 80: mod_base = OTHER; note = 2'-O-methyl modified nucleotide
  modified_base 81: mod_base = OTHER; note = 2'-O-methyl modified nucleotide
  modified_base 82: mod_base = OTHER; note = 2'-O-methyl modified nucleotide
  modified_base 83: mod_base = OTHER; note = 2'-O-methyl modified nucleotide
  modified_base 84: mod_base = OTHER; note = 2'-O-methyl modified nucleotide
  modified_base 85: mod_base = OTHER; note = 2'-O-methyl modified nucleotide
  modified_base 86: mod_base = OTHER; note = 2'-O-methyl modified nucleotide
  modified_base 87: mod_base = OTHER; note = 2'-O-methyl modified nucleotide
  modified_base 88: mod_base = OTHER; note = 2'-O-methyl modified nucleotide
  modified_base 89: mod_base = OTHER; note = 2'-O-methyl modified nucleotide
  modified_base 90: mod_base = OTHER; note = 2'-O-methyl modified nucleotide
  modified_base 91: mod_base = OTHER; note = 2'-O-methyl modified nucleotide
  modified_base 92: mod_base = OTHER; note = 2'-O-methyl modified nucleotide
  modified_base 93: mod_base = OTHER; note = 2'-O-methyl modified nucleotide
  modified_base 94: mod_base = OTHER; note = 2'-O-methyl modified nucleotide
  modified_base 95: mod_base = OTHER; note = 2'-O-methyl modified nucleotide
  modified_base 96: mod_base = OTHER; note = 2'-O-methyl modified nucleotide
  modified_base 120: mod_base = OTHER; note = Nucleotide with phosphorothioate linkage
  modified_base 121: mod_base = OTHER; note = 2'-O-methyl modified nucleotide with phosphorothioate linkage
  modified_base 122: mod_base = OTHER; note = 2'-O-methyl modified nucleotide with phosphorothioate linkage
  modified_base 123: mod_base = OTHER; note = 2'-O-methyl modified nucleotide
actcacgctggatagcctccgttttagagctagaaatagcaagttaaaataaggctagtccgttatcaacttgaaaaagtggcaccgagtcggtgctttctggcctggataacggctatccag

SEQ ID NO: 17587 - RNA, 122 nt, synthetic construct
  source 1..122: mol_type = other RNA
  modified_base 1: mod_base = OTHER; note = 2'-O-methyl modified nucleotide with phosphorothioate linkage
  modified_base 2: mod_base = OTHER; note = 2'-O-methyl modified nucleotide with phosphorothioate linkage
  modified_base 3: mod_base = OTHER; note = 2'-O-methyl modified nucleotide with phosphorothioate linkage
  modified_base 29: mod_base = OTHER; note = 2'-O-methyl modified nucleotide
  modified_base 30: mod_base = OTHER; note = 2'-O-methyl modified nucleotide
  modified_base 31: mod_base = OTHER; note = 2'-O-methyl modified nucleotide
  modified_base 32: mod_base = OTHER; note = 2'-O-methyl modified nucleotide
  modified_base 33: mod_base = OTHER; note = 2'-O-methyl modified nucleotide
  modified_base 34: mod_base = OTHER; note = 2'-O-methyl modified nucleotide
  modified_base 35: mod_base = OTHER; note = 2'-O-methyl modified nucleotide
  modified_base 36: mod_base = OTHER; note = 2'-O-methyl modified nucleotide
  modified_base 37: mod_base = OTHER; note = 2'-O-methyl modified nucleotide
  modified_base 38: mod_base = OTHER; note = 2'-O-methyl modified nucleotide
  modified_base 39: mod_base = OTHER; note = 2'-O-methyl modified nucleotide
  modified_base 40: mod_base = OTHER; note = 2'-O-methyl modified nucleotide
  modified_base 69: mod_base = OTHER; note = 2'-O-methyl modified nucleotide
  modified_base 70: mod_base = OTHER; note = 2'-O-methyl modified nucleotide
  modified_base 71: mod_base = OTHER; note = 2'-O-methyl modified nucleotide
  modified_base 72: mod_base = OTHER; note = 2'-O-methyl modified nucleotide
  modified_base 73: mod_base = OTHER; note = 2'-O-methyl modified nucleotide
  modified_base 74: mod_base = OTHER; note = 2'-O-methyl modified nucleotide
  modified_base 75: mod_base = OTHER; note = 2'-O-methyl modified nucleotide
  modified_base 76: mod_base = OTHER; note = 2'-O-methyl modified nucleotide
  modified_base 77: mod_base = OTHER; note = 2'-O-methyl modified nucleotide
  modified_base 78: mod_base = OTHER; note = 2'-O-methyl modified nucleotide
  modified_base 79: mod_base = OTHER; note = 2'-O-methyl modified nucleotide
  modified_base 80: mod_base = OTHER; note = 2'-O-methyl modified nucleotide
  modified_base 81: mod_base = OTHER; note = 2'-O-methyl modified nucleotide
  modified_base 82: mod_base = OTHER; note = 2'-O-methyl modified nucleotide
  modified_base 83: mod_base = OTHER; note = 2'-O-methyl modified nucleotide
  modified_base 84: mod_base = OTHER; note = 2'-O-methyl modified nucleotide
  modified_base 85: mod_base = OTHER; note = 2'-O-methyl modified nucleotide
  modified_base 86: mod_base = OTHER; note = 2'-O-methyl modified nucleotide
  modified_base 87: mod_base = OTHER; note = 2'-O-methyl modified nucleotide
  modified_base 88: mod_base = OTHER; note = 2'-O-methyl modified nucleotide
  modified_base 89: mod_base = OTHER; note = 2'-O-methyl modified nucleotide
  modified_base 90: mod_base = OTHER; note = 2'-O-methyl modified nucleotide
  modified_base 91: mod_base = OTHER; note = 2'-O-methyl modified nucleotide
  modified_base 92: mod_base = OTHER; note = 2'-O-methyl modified nucleotide
  modified_base 93: mod_base = OTHER; note = 2'-O-methyl modified nucleotide
  modified_base 94: mod_base = OTHER; note = 2'-O-methyl modified nucleotide
  modified_base 95: mod_base = OTHER; note = 2'-O-methyl modified nucleotide
  modified_base 96: mod_base = OTHER; note = 2'-O-methyl modified nucleotide
  modified_base 119: mod_base = OTHER; note = Nucleotide with phosphorothioate linkage
  modified_base 120: mod_base = OTHER; note = 2'-O-methyl modified nucleotide with phosphorothioate linkage
  modified_base 121: mod_base = OTHER; note = 2'-O-methyl modified nucleotide with phosphorothioate linkage
  modified_base 122: mod_base = OTHER; note = 2'-O-methyl modified nucleotide
actcacgctggatagcctccgttttagagctagaaatagcaagttaaaataaggctagtccgttatcaacttgaaaaagtggcaccgagtcggtgctttctggcctggataacggctatcca

SEQ ID NO: 17588 - RNA, 121 nt, synthetic construct
  source 1..121: mol_type = other RNA
  modified_base 1: mod_base = OTHER; note = 2'-O-methyl modified nucleotide with phosphorothioate linkage
  modified_base 2: mod_base = OTHER; note = 2'-O-methyl modified nucleotide with phosphorothioate linkage
  modified_base 3: mod_base = OTHER; note = 2'-O-methyl modified nucleotide with phosphorothioate linkage
  modified_base 29: mod_base = OTHER; note = 2'-O-methyl modified nucleotide
  modified_base 30: mod_base = OTHER; note = 2'-O-methyl modified nucleotide
  modified_base 31: mod_base = OTHER; note = 2'-O-methyl modified nucleotide
  modified_base 32: mod_base = OTHER; note = 2'-O-methyl modified nucleotide
  modified_base 33: mod_base = OTHER; note = 2'-O-methyl modified nucleotide
  modified_base 34: mod_base = OTHER; note = 2'-O-methyl modified nucleotide
  modified_base 35: mod_base = OTHER; note = 2'-O-methyl modified nucleotide
  modified_base 36: mod_base = OTHER; note = 2'-O-methyl modified nucleotide
  modified_base 37: mod_base = OTHER; note = 2'-O-methyl modified nucleotide
  modified_base 38: mod_base = OTHER; note = 2'-O-methyl modified nucleotide
  modified_base 39: mod_base = OTHER; note = 2'-O-methyl modified nucleotide
  modified_base 40: mod_base = OTHER; note = 2'-O-methyl modified nucleotide
  modified_base 69: mod_base = OTHER; note = 2'-O-methyl modified nucleotide
  modified_base 70: mod_base = OTHER; note = 2'-O-methyl modified nucleotide
  modified_base 71: mod_base = OTHER; note = 2'-O-methyl modified nucleotide
  modified_base 72: mod_base = OTHER; note = 2'-O-methyl modified nucleotide
  modified_base 73: mod_base = OTHER; note = 2'-O-methyl modified nucleotide
  modified_base 74: mod_base = OTHER; note = 2'-O-methyl modified nucleotide
  modified_base 75: mod_base = OTHER; note = 2'-O-methyl modified nucleotide
  modified_base 76: mod_base = OTHER; note = 2'-O-methyl modified nucleotide
  modified_base 77: mod_base = OTHER; note = 2'-O-methyl modified nucleotide
  modified_base 78: mod_base = OTHER; note = 2'-O-methyl modified nucleotide
  modified_base 79: mod_base = OTHER; note = 2'-O-methyl modified nucleotide
  modified_base 80: mod_base = OTHER; note = 2'-O-methyl modified nucleotide
  modified_base 81: mod_base = OTHER; note = 2'-O-methyl modified nucleotide
  modified_base 82: mod_base = OTHER; note = 2'-O-methyl modified nucleotide
  modified_base 83: mod_base = OTHER; note = 2'-O-methyl modified nucleotide
  modified_base 84: mod_base = OTHER; note = 2'-O-methyl modified nucleotide
  modified_base 85: mod_base = OTHER; note = 2'-O-methyl modified nucleotide
  modified_base 86: mod_base = OTHER; note = 2'-O-methyl modified nucleotide
  modified_base 87: mod_base = OTHER; note = 2'-O-methyl modified nucleotide
  modified_base 88: mod_base = OTHER; note = 2'-O-methyl modified nucleotide
  modified_base 89: mod_base = OTHER; note = 2'-O-methyl modified nucleotide
  modified_base 90: mod_base = OTHER; note = 2'-O-methyl modified nucleotide
  modified_base 91: mod_base = OTHER; note = 2'-O-methyl modified nucleotide
  modified_base 92: mod_base = OTHER; note = 2'-O-methyl modified nucleotide
  modified_base 93: mod_base = OTHER; note = 2'-O-methyl modified nucleotide
  modified_base 94: mod_base = OTHER; note = 2'-O-methyl modified nucleotide
  modified_base 95: mod_base = OTHER; note = 2'-O-methyl modified nucleotide
  modified_base 96: mod_base = OTHER; note = 2'-O-methyl modified nucleotide
  modified_base 118: mod_base = OTHER; note = Nucleotide with phosphorothioate linkage
  modified_base 119: mod_base = OTHER; note = 2'-O-methyl modified nucleotide with phosphorothioate linkage
  modified_base 120: mod_base = OTHER; note = 2'-O-methyl modified nucleotide with phosphorothioate linkage
  modified_base 121: mod_base = OTHER; note = 2'-O-methyl modified nucleotide
actcacgctggatagcctccgttttagagctagaaatagcaagttaaaataaggctagtccgttatcaacttgaaaaagtggcaccgagtcggtgctttctggcctggataacggctatcc

SEQ ID NO: 17589 - RNA, 128 nt, synthetic construct
  source 1..128: mol_type = other RNA
  modified_base 1: mod_base = OTHER; note = 2'-O-methyl modified nucleotide with phosphorothioate linkage
  modified_base 2: mod_base = OTHER; note = 2'-O-methyl modified nucleotide with phosphorothioate linkage
  modified_base 3: mod_base = OTHER; note = 2'-O-methyl modified nucleotide with phosphorothioate linkage
  modified_base 29: mod_base = OTHER; note = 2'-O-methyl modified nucleotide
  modified_base 30: mod_base = OTHER; note = 2'-O-methyl modified nucleotide
  modified_base 31: mod_base = OTHER; note = 2'-O-methyl modified nucleotide
  modified_base 32: mod_base = OTHER; note = 2'-O-methyl modified nucleotide
  modified_base 33: mod_base = OTHER; note = 2'-O-methyl modified nucleotide
  modified_base 34: mod_base = OTHER; note = 2'-O-methyl modified nucleotide
  modified_base 35: mod_base = OTHER; note = 2'-O-methyl modified nucleotide
  modified_base 36: mod_base = OTHER; note = 2'-O-methyl modified nucleotide
  modified_base 37: mod_base = OTHER; note = 2'-O-methyl modified nucleotide
  modified_base 38: mod_base = OTHER; note = 2'-O-methyl modified nucleotide
  modified_base 39: mod_base = OTHER; note = 2'-O-methyl modified nucleotide
  modified_base 40: mod_base = OTHER; note = 2'-O-methyl modified nucleotide
  modified_base 69: mod_base = OTHER; note = 2'-O-methyl modified nucleotide
  modified_base 70: mod_base = OTHER; note = 2'-O-methyl modified nucleotide
  modified_base 71: mod_base = OTHER; note = 2'-O-methyl modified nucleotide
  modified_base 72: mod_base = OTHER; note = 2'-O-methyl modified nucleotide
  modified_base 73: mod_base = OTHER; note = 2'-O-methyl modified nucleotide
  modified_base 74: mod_base = OTHER; note = 2'-O-methyl modified nucleotide
  modified_base 75: mod_base = OTHER; note = 2'-O-methyl modified nucleotide
  modified_base 76: mod_base = OTHER; note = 2'-O-methyl modified nucleotide
  modified_base 77: mod_base = OTHER; note = 2'-O-methyl modified nucleotide
  modified_base 78: mod_base = OTHER; note = 2'-O-methyl modified nucleotide
  modified_base 79: mod_base = OTHER; note = 2'-O-methyl modified nucleotide
  modified_base 80: mod_base = OTHER; note = 2'-O-methyl modified nucleotide
  modified_base 81: mod_base = OTHER; note = 2'-O-methyl modified nucleotide
  modified_base 82: mod_base = OTHER; note = 2'-O-methyl modified nucleotide
  modified_base 83: mod_base = OTHER; note = 2'-O-methyl modified nucleotide
  modified_base 84: mod_base = OTHER; note = 2'-O-methyl modified nucleotide
  modified_base 85: mod_base = OTHER; note = 2'-O-methyl modified nucleotide
  modified_base 86: mod_base = OTHER; note = 2'-O-methyl modified nucleotide
  modified_base 87: mod_base = OTHER; note = 2'-O-methyl modified nucleotide
  modified_base 88: mod_base = OTHER; note = 2'-O-methyl modified nucleotide
  modified_base 89: mod_base = OTHER; note = 2'-O-methyl modified nucleotide
  modified_base 90: mod_base = OTHER; note = 2'-O-methyl modified nucleotide
  modified_base 91: mod_base = OTHER; note = 2'-O-methyl modified nucleotide
  modified_base 92: mod_base = OTHER; note = 2'-O-methyl modified nucleotide
  modified_base 93: mod_base = OTHER; note = 2'-O-methyl modified nucleotide
  modified_base 94: mod_base = OTHER; note = 2'-O-methyl modified nucleotide
  modified_base 95: mod_base = OTHER; note = 2'-O-methyl modified nucleotide
  modified_base 96: mod_base = OTHER; note = 2'-O-methyl modified nucleotide
  modified_base 125: mod_base = OTHER; note = Nucleotide with phosphorothioate linkage
  modified_base 126: mod_base = OTHER; note = 2'-O-methyl modified nucleotide with phosphorothioate linkage
  modified_base 127: mod_base = OTHER; note = 2'-O-methyl modified nucleotide with phosphorothioate linkage
  modified_base 128: mod_base = OTHER; note = 2'-O-methyl modified nucleotide
actcacgctggatagcctccgttttagagctagaaatagcaagttaaaataaggctagtccgttatcaacttgaaaaagtggcaccgagtcggtgctctttctggcctggataacggctatccagcgt

SEQ ID NO: 17590 - RNA, 127 nt, synthetic construct
  source 1..127: mol_type = other RNA
  modified_base 1: mod_base = OTHER; note = 2'-O-methyl modified nucleotide with phosphorothioate linkage
  modified_base 2: mod_base = OTHER; note = 2'-O-methyl modified nucleotide with phosphorothioate linkage
  modified_base 3: mod_base = OTHER; note = 2'-O-methyl modified nucleotide with phosphorothioate linkage
  modified_base 29: mod_base = OTHER; note = 2'-O-methyl modified nucleotide
  modified_base 30: mod_base = OTHER; note = 2'-O-methyl modified nucleotide
  modified_base 31: mod_base = OTHER; note = 2'-O-methyl modified nucleotide
  modified_base 32: mod_base = OTHER; note = 2'-O-methyl modified nucleotide
  modified_base 33: mod_base = OTHER; note = 2'-O-methyl modified nucleotide
  modified_base 34: mod_base = OTHER; note = 2'-O-methyl modified nucleotide
  modified_base 35: mod_base = OTHER; note = 2'-O-methyl modified nucleotide
  modified_base 36: mod_base = OTHER; note = 2'-O-methyl modified nucleotide
  modified_base 37: mod_base = OTHER; note = 2'-O-methyl modified nucleotide
  modified_base 38: mod_base = OTHER; note = 2'-O-methyl modified nucleotide
  modified_base 39: mod_base = OTHER; note = 2'-O-methyl modified nucleotide
  modified_base 40: mod_base = OTHER; note = 2'-O-methyl modified nucleotide
  modified_base 69: mod_base = OTHER; note = 2'-O-methyl modified nucleotide
  modified_base 70: mod_base = OTHER; note = 2'-O-methyl modified nucleotide
  modified_base 71: mod_base = OTHER; note = 2'-O-methyl modified nucleotide
  modified_base 72: mod_base = OTHER; note = 2'-O-methyl modified nucleotide
  modified_base 73: mod_base = OTHER; note = 2'-O-methyl modified nucleotide
  modified_base 74: mod_base = OTHER; note = 2'-O-methyl modified nucleotide
  modified_base 75: mod_base = OTHER; note = 2'-O-methyl modified nucleotide
  modified_base 76: mod_base = OTHER; note = 2'-O-methyl modified nucleotide
  modified_base 77: mod_base = OTHER; note = 2'-O-methyl modified nucleotide
  modified_base 78: mod_base = OTHER; note = 2'-O-methyl modified nucleotide
  modified_base 79: mod_base = OTHER; note = 2'-O-methyl modified nucleotide
  modified_base 80: mod_base = OTHER; note = 2'-O-methyl modified nucleotide
  modified_base 81: mod_base = OTHER; note = 2'-O-methyl modified nucleotide
  modified_base 82: mod_base = OTHER; note = 2'-O-methyl modified nucleotide
  modified_base 83: mod_base = OTHER; note = 2'-O-methyl modified nucleotide
  modified_base 84: mod_base = OTHER; note = 2'-O-methyl modified nucleotide
  modified_base 85: mod_base = OTHER; note = 2'-O-methyl modified nucleotide
  modified_base 86: mod_base = OTHER; note = 2'-O-methyl modified nucleotide
  modified_base 87: mod_base = OTHER; note = 2'-O-methyl modified nucleotide
  modified_base 88: mod_base = OTHER; note = 2'-O-methyl modified nucleotide
  modified_base 89: mod_base = OTHER; note = 2'-O-methyl modified nucleotide
  modified_base 90: mod_base = OTHER; note = 2'-O-methyl modified nucleotide
  modified_base 91: mod_base = OTHER; note = 2'-O-methyl modified nucleotide
  modified_base 92: mod_base = OTHER; note = 2'-O-methyl modified nucleotide
  modified_base 93: mod_base = OTHER; note = 2'-O-methyl modified nucleotide
  modified_base 94: mod_base = OTHER; note = 2'-O-methyl modified nucleotide
  modified_base 95: mod_base = OTHER; note = 2'-O-methyl modified nucleotide
  modified_base 96: mod_base = OTHER; note = 2'-O-methyl modified nucleotide
  modified_base 124: mod_base = OTHER; note = Nucleotide with phosphorothioate linkage
  modified_base 125: mod_base = OTHER; note = 2'-O-methyl modified nucleotide with phosphorothioate linkage
  modified_base 126: mod_base = OTHER; note = 2'-O-methyl modified nucleotide with phosphorothioate linkage
  modified_base 127: mod_base = OTHER; note = 2'-O-methyl modified nucleotide
actcacgctggatagcctccgttttagagctagaaatagcaagttaaaataaggctagtccgttatcaacttgaaaaagtggcaccgagtcggtgctctttctggcctggataacggctatccagcg

SEQ ID NO: 17591 - RNA, 126 nt, synthetic construct
  source 1..126: mol_type = other RNA
  modified_base 1: mod_base = OTHER; note = 2'-O-methyl modified nucleotide with phosphorothioate linkage
  modified_base 2: mod_base = OTHER; note = 2'-O-methyl modified nucleotide with phosphorothioate linkage
  modified_base 3: mod_base = OTHER; note = 2'-O-methyl modified nucleotide with phosphorothioate linkage
  modified_base 29: mod_base = OTHER; note = 2'-O-methyl modified nucleotide
  modified_base 30: mod_base = OTHER; note = 2'-O-methyl modified nucleotide
  modified_base 31: mod_base = OTHER; note = 2'-O-methyl modified nucleotide
  modified_base 32: mod_base = OTHER; note = 2'-O-methyl modified nucleotide
  modified_base 33: mod_base = OTHER; note = 2'-O-methyl modified nucleotide
  modified_base 34: mod_base = OTHER; note = 2'-O-methyl modified nucleotide
  modified_base 35: mod_base = OTHER; note = 2'-O-methyl modified nucleotide
  modified_base 36: mod_base = OTHER; note = 2'-O-methyl modified nucleotide
  modified_base 37: mod_base = OTHER; note = 2'-O-methyl modified nucleotide
  modified_base 38: mod_base = OTHER; note = 2'-O-methyl modified nucleotide
  modified_base 39: mod_base = OTHER; note = 2'-O-methyl modified nucleotide
  modified_base 40: mod_base = OTHER; note = 2'-O-methyl modified nucleotide
  modified_base 69: mod_base = OTHER; note = 2'-O-methyl modified nucleotide
  modified_base 70: mod_base = OTHER; note = 2'-O-methyl modified nucleotide
  modified_base 71: mod_base = OTHER; note = 2'-O-methyl modified nucleotide
  modified_base 72: mod_base = OTHER; note = 2'-O-methyl modified nucleotide
  modified_base 73: mod_base = OTHER; note = 2'-O-methyl modified nucleotide
  modified_base 74: mod_base = OTHER; note = 2'-O-methyl modified nucleotide
  modified_base 75: mod_base = OTHER; note = 2'-O-methyl modified nucleotide
  modified_base 76: mod_base = OTHER; note = 2'-O-methyl modified nucleotide
  modified_base 77: mod_base = OTHER; note = 2'-O-methyl modified nucleotide
  modified_base 78: mod_base = OTHER; note = 2'-O-methyl modified nucleotide
  modified_base 79: mod_base = OTHER; note = 2'-O-methyl modified nucleotide
  modified_base 80: mod_base = OTHER; note = 2'-O-methyl modified nucleotide
  modified_base 81: mod_base = OTHER; note = 2'-O-methyl modified nucleotide
  modified_base 82: mod_base = OTHER; note = 2'-O-methyl modified nucleotide
  modified_base 83: mod_base = OTHER; note = 2'-O-methyl modified nucleotide
  modified_base 84: mod_base = OTHER; note = 2'-O-methyl modified nucleotide
  modified_base 85: mod_base = OTHER; note = 2'-O-methyl modified nucleotide
  modified_base 86: mod_base = OTHER; note = 2'-O-methyl modified nucleotide
  modified_base 87: mod_base = OTHER; note = 2'-O-methyl modified nucleotide
  modified_base 88: mod_base = OTHER; note = 2'-O-methyl modified nucleotide
  modified_base 89: mod_base = OTHER; note = 2'-O-methyl modified nucleotide
  modified_base 90: mod_base = OTHER; note = 2'-O-methyl modified nucleotide
  modified_base 91: mod_base = OTHER; note = 2'-O-methyl modified nucleotide
  modified_base 92: mod_base = OTHER; note = 2'-O-methyl modified nucleotide
  modified_base 93: mod_base = OTHER; note = 2'-O-methyl modified nucleotide
  modified_base 94: mod_base = OTHER; note = 2'-O-methyl modified nucleotide
  modified_base 95: mod_base = OTHER; note = 2'-O-methyl modified nucleotide
  modified_base 96: mod_base = OTHER; note = 2'-O-methyl modified nucleotide
  modified_base 123: mod_base = OTHER; note = Nucleotide with phosphorothioate linkage
  modified_base 124: mod_base = OTHER; note = 2'-O-methyl modified nucleotide with phosphorothioate linkage
  modified_base 125: mod_base = OTHER; note = 2'-O-methyl modified nucleotide with phosphorothioate linkage
  modified_base 126: mod_base = OTHER; note = 2'-O-methyl modified nucleotide
actcacgctggatagcctccgttttagagctagaaatagcaagttaaaataaggctagtccgttatcaacttgaaaaagtggcaccgagtcggtgctctttctggcctggataacggctatccagc

SEQ ID NO: 17592 - RNA, 125 nt, synthetic construct
  source 1..125: mol_type = other RNA
  modified_base 1: mod_base = OTHER; note = 2'-O-methyl modified nucleotide with phosphorothioate linkage
  modified_base 2: mod_base = OTHER; note = 2'-O-methyl modified nucleotide with phosphorothioate linkage
  modified_base 3: mod_base = OTHER; note = 2'-O-methyl modified nucleotide with phosphorothioate linkage
  modified_base 29: mod_base = OTHER; note = 2'-O-methyl modified nucleotide
  modified_base 30: mod_base = OTHER; note = 2'-O-methyl modified nucleotide
  modified_base 31: mod_base = OTHER; note = 2'-O-methyl modified nucleotide
  modified_base 32: mod_base = OTHER; note = 2'-O-methyl modified nucleotide
  modified_base 33: mod_base = OTHER; note = 2'-O-methyl modified nucleotide
  modified_base 34: mod_base = OTHER; note = 2'-O-methyl modified nucleotide
  modified_base 35: mod_base = OTHER; note = 2'-O-methyl modified nucleotide
  modified_base 36: mod_base = OTHER; note = 2'-O-methyl modified nucleotide
  modified_base 37: mod_base = OTHER; note = 2'-O-methyl modified nucleotide
  modified_base 38: mod_base = OTHER; note = 2'-O-methyl modified nucleotide
  modified_base 39: mod_base = OTHER; note = 2'-O-methyl modified nucleotide
  modified_base 40: mod_base = OTHER; note = 2'-O-methyl modified nucleotide
  modified_base 69: mod_base = OTHER; note = 2'-O-methyl modified nucleotide
  modified_base 70: mod_base = OTHER; note = 2'-O-methyl modified nucleotide
  modified_base 71: mod_base = OTHER; note = 2'-O-methyl modified nucleotide
  modified_base 72: mod_base = OTHER; note = 2'-O-methyl modified nucleotide
  modified_base 73: mod_base = OTHER; note = 2'-O-methyl modified nucleotide
  modified_base 74: mod_base = OTHER; note = 2'-O-methyl modified nucleotide
  modified_base 75: mod_base = OTHER; note = 2'-O-methyl modified nucleotide
  modified_base 76: mod_base = OTHER; note = 2'-O-methyl modified nucleotide
  modified_base 77: mod_base = OTHER; note = 2'-O-methyl modified nucleotide
  modified_base 78: mod_base = OTHER; note = 2'-O-methyl modified nucleotide
  modified_base 79: mod_base = OTHER; note = 2'-O-methyl modified nucleotide
  modified_base 80: mod_base = OTHER; note = 2'-O-methyl modified nucleotide
  modified_base 81: mod_base = OTHER; note = 2'-O-methyl modified nucleotide
  modified_base 82: mod_base = OTHER; note = 2'-O-methyl modified nucleotide
  modified_base 83: mod_base = OTHER; note = 2'-O-methyl modified nucleotide
  modified_base 84: mod_base = OTHER; note = 2'-O-methyl modified nucleotide
  modified_base 85: mod_base = OTHER; note = 2'-O-methyl modified nucleotide
  modified_base 86: mod_base = OTHER; note = 2'-O-methyl modified nucleotide
  modified_base 87: mod_base = OTHER; note = 2'-O-methyl modified nucleotide
  modified_base 88: mod_base = OTHER; note = 2'-O-methyl modified nucleotide
  modified_base 89: mod_base = OTHER; note = 2'-O-methyl modified nucleotide
  modified_base 90: mod_base = OTHER; note = 2'-O-methyl modified nucleotide
  modified_base 91: mod_base = OTHER; note = 2'-O-methyl modified nucleotide
  modified_base 92: mod_base = OTHER; note = 2'-O-methyl modified nucleotide
  modified_base 93: mod_base = OTHER; note = 2'-O-methyl modified nucleotide
  modified_base 94: mod_base = OTHER; note = 2'-O-methyl modified nucleotide
  modified_base 95: mod_base = OTHER; note = 2'-O-methyl modified nucleotide
  modified_base 96: mod_base = OTHER; note = 2'-O-methyl modified nucleotide
  modified_base 122: mod_base = OTHER; note = Nucleotide with phosphorothioate linkage
  modified_base 123: mod_base = OTHER; note = 2'-O-methyl modified nucleotide with phosphorothioate linkage
  modified_base 124: mod_base = OTHER; note = 2'-O-methyl modified nucleotide with phosphorothioate linkage
  modified_base 125: mod_base = OTHER; note = 2'-O-methyl modified nucleotide
actcacgctggatagcctccgttttagagctagaaatagcaagttaaaataaggctagtccgttatcaacttgaaaaagtggcaccgagtcggtgctctttctggcctggataacggctatccag

SEQ ID NO: 17593 - RNA, 124 nt, synthetic construct
  source 1..124: mol_type = other RNA
  modified_base 1: mod_base = OTHER; note = 2'-O-methyl modified nucleotide with phosphorothioate linkage
  modified_base 2: mod_base = OTHER; note = 2'-O-methyl modified nucleotide with phosphorothioate linkage
  modified_base 3: mod_base = OTHER; note = 2'-O-methyl modified nucleotide with phosphorothioate linkage
  modified_base 29: mod_base = OTHER; note = 2'-O-methyl modified nucleotide
  modified_base 30: mod_base = OTHER; note = 2'-O-methyl modified nucleotide
  modified_base 31: mod_base = OTHER; note = 2'-O-methyl modified nucleotide
  modified_base 32: mod_base = OTHER; note = 2'-O-methyl modified nucleotide
  modified_base 33: mod_base = OTHER; note = 2'-O-methyl modified nucleotide
  modified_base 34: mod_base = OTHER; note = 2'-O-methyl modified nucleotide
  modified_base 35: mod_base = OTHER; note = 2'-O-methyl modified nucleotide
  modified_base 36: mod_base = OTHER; note = 2'-O-methyl modified nucleotide
  modified_base 37: mod_base = OTHER; note = 2'-O-methyl modified nucleotide
  modified_base 38: mod_base = OTHER; note = 2'-O-methyl modified nucleotide
  modified_base 39: mod_base = OTHER; note = 2'-O-methyl modified nucleotide
  modified_base 40: mod_base = OTHER; note = 2'-O-methyl modified nucleotide
  modified_base 69: mod_base = OTHER; note = 2'-O-methyl modified nucleotide
  modified_base 70: mod_base = OTHER; note = 2'-O-methyl modified nucleotide
  modified_base 71: mod_base = OTHER; note = 2'-O-methyl modified nucleotide
  modified_base 72: mod_base = OTHER; note = 2'-O-methyl modified nucleotide
  modified_base 73: mod_base = OTHER; note = 2'-O-methyl modified nucleotide
  modified_base 74: mod_base = OTHER; note = 2'-O-methyl modified nucleotide
  modified_base 75: mod_base = OTHER; note = 2'-O-methyl modified nucleotide
  modified_base 76: mod_base = OTHER; note = 2'-O-methyl modified nucleotide
  modified_base 77: mod_base = OTHER; note = 2'-O-methyl modified nucleotide
  modified_base 78: mod_base = OTHER; note = 2'-O-methyl modified nucleotide
  modified_base 79: mod_base = OTHER; note = 2'-O-methyl modified nucleotide
  modified_base 80: mod_base = OTHER; note = 2'-O-methyl modified nucleotide
  modified_base 81: mod_base = OTHER; note = 2'-O-methyl modified nucleotide
  modified_base 82: mod_base = OTHER; note = 2'-O-methyl modified nucleotide
  modified_base 83: mod_base = OTHER; note = 2'-O-methyl modified nucleotide
  modified_base 84: mod_base = OTHER; note = 2'-O-methyl modified nucleotide
  modified_base 85: mod_base = OTHER; note = 2'-O-methyl modified nucleotide
  modified_base 86: mod_base = OTHER; note = 2'-O-methyl modified nucleotide
  modified_base 87: mod_base = OTHER; note = 2'-O-methyl modified nucleotide
  modified_base 88: mod_base = OTHER; note = 2'-O-methyl modified nucleotide
  modified_base 89: mod_base = OTHER; note = 2'-O-methyl modified nucleotide
  modified_base 90: mod_base = OTHER; note = 2'-O-methyl modified nucleotide
  modified_base 91: mod_base = OTHER; note = 2'-O-methyl modified nucleotide
  modified_base 92: mod_base = OTHER; note = 2'-O-methyl modified nucleotide
  modified_base 93: mod_base = OTHER; note = 2'-O-methyl modified nucleotide
  modified_base 94: mod_base = OTHER; note = 2'-O-methyl modified nucleotide
  modified_base 95: mod_base = OTHER; note = 2'-O-methyl modified nucleotide
  modified_base 96: mod_base = OTHER; note = 2'-O-methyl modified nucleotide
  modified_base 121: mod_base = OTHER; note = Nucleotide with phosphorothioate linkage
  modified_base 122: mod_base = OTHER; note = 2'-O-methyl modified nucleotide with phosphorothioate linkage
  modified_base 123: mod_base = OTHER; note = 2'-O-methyl modified nucleotide with phosphorothioate linkage
  modified_base 124: mod_base = OTHER; note = 2'-O-methyl modified nucleotide
actcacgctggatagcctccgttttagagctagaaatagcaagttaaaataaggctagtccgttatcaacttgaaaaagtggcaccgagtcggtgctctttctggcctggataacggctatcca

SEQ ID NO: 17594 - RNA, 123 nt, synthetic construct
  source 1..123: mol_type = other RNA
  modified_base 1: mod_base = OTHER; note = 2'-O-methyl modified nucleotide with phosphorothioate linkage
  modified_base 2: mod_base = OTHER; note = 2'-O-methyl modified nucleotide with phosphorothioate linkage
  modified_base 3: mod_base = OTHER; note = 2'-O-methyl modified nucleotide with phosphorothioate linkage
  modified_base 29: mod_base = OTHER; note = 2'-O-methyl modified nucleotide
  modified_base 30: mod_base = OTHER; note = 2'-O-methyl modified nucleotide
  modified_base 31: mod_base = OTHER; note = 2'-O-methyl modified nucleotide
  modified_base 32: mod_base = OTHER; note = 2'-O-methyl modified nucleotide
  modified_base 33: mod_base = OTHER; note = 2'-O-methyl modified nucleotide
  modified_base 34: mod_base = OTHER; note = 2'-O-methyl modified nucleotide
  modified_base 35: mod_base = OTHER; note = 2'-O-methyl modified nucleotide
  modified_base 36: mod_base = OTHER; note = 2'-O-methyl modified nucleotide
  modified_base 37: mod_base = OTHER; note = 2'-O-methyl modified nucleotide
  modified_base 38: mod_base = OTHER; note = 2'-O-methyl modified nucleotide
  modified_base 39: mod_base = OTHER; note = 2'-O-methyl modified nucleotide
  modified_base 40: mod_base = OTHER; note = 2'-O-methyl modified nucleotide
  modified_base 69: mod_base = OTHER; note = 2'-O-methyl modified nucleotide
  modified_base 70: mod_base = OTHER; note = 2'-O-methyl modified nucleotide
  modified_base 71: mod_base = OTHER; note = 2'-O-methyl modified nucleotide
  modified_base 72: mod_base = OTHER; note = 2'-O-methyl modified nucleotide
  modified_base 73: mod_base = OTHER; note = 2'-O-methyl modified nucleotide
  modified_base 74: mod_base = OTHER; note = 2'-O-methyl modified nucleotide
  modified_base 75: mod_base = OTHER; note = 2'-O-methyl modified nucleotide
  modified_base 76: mod_base = OTHER; note = 2'-O-methyl modified nucleotide
  modified_base 77: mod_base = OTHER; note = 2'-O-methyl modified nucleotide
  modified_base 78: mod_base = OTHER; note = 2'-O-methyl modified nucleotide
  modified_base 79: mod_base = OTHER; note = 2'-O-methyl modified nucleotide
  modified_base 80: mod_base = OTHER; note = 2'-O-methyl modified nucleotide
  modified_base 81: mod_base = OTHER; note = 2'-O-methyl modified nucleotide
  modified_base 82: mod_base = OTHER; note = 2'-O-methyl modified nucleotide
  modified_base 83: mod_base = OTHER; note = 2'-O-methyl modified nucleotide
  modified_base 84: mod_base = OTHER; note = 2'-O-methyl modified nucleotide
  modified_base 85: mod_base = OTHER; note = 2'-O-methyl modified nucleotide
  modified_base 86: mod_base = OTHER; note = 2'-O-methyl modified nucleotide
  modified_base 87: mod_base = OTHER; note = 2'-O-methyl modified nucleotide
  modified_base 88: mod_base = OTHER; note = 2'-O-methyl modified nucleotide
  modified_base 89: mod_base = OTHER; note = 2'-O-methyl modified nucleotide
  modified_base 90: mod_base = OTHER; note = 2'-O-methyl modified nucleotide
  modified_base 91: mod_base = OTHER; note = 2'-O-methyl modified nucleotide
  modified_base 92: mod_base = OTHER; note = 2'-O-methyl modified nucleotide
  modified_base 93: mod_base = OTHER; note = 2'-O-methyl modified nucleotide
  modified_base 94: mod_base = OTHER; note = 2'-O-methyl modified nucleotide
  modified_base 95: mod_base = OTHER; note = 2'-O-methyl modified nucleotide
  modified_base 96: mod_base = OTHER; note = 2'-O-methyl modified nucleotide
  modified_base 120: mod_base = OTHER; note = Nucleotide with phosphorothioate linkage
  modified_base 121: mod_base = OTHER; note = 2'-O-methyl modified nucleotide with phosphorothioate linkage
  modified_base 122: mod_base = OTHER; note = 2'-O-methyl modified nucleotide with phosphorothioate linkage
  modified_base 123: mod_base = OTHER; note = 2'-O-methyl modified nucleotide
actcacgctggatagcctccgttttagagctagaaatagcaagttaaaataaggctagtccgttatcaacttgaaaaagtggcaccgagtcggtgctctttctggcctggataacggctatcc

SEQ ID NO: 17595 - RNA, 130 nt, synthetic construct
  source 1..130: mol_type = other RNA
  modified_base 1: mod_base = OTHER; note = 2'-O-methyl modified nucleotide with phosphorothioate linkage
  modified_base 2: mod_base = OTHER; note = 2'-O-methyl modified nucleotide with phosphorothioate linkage
  modified_base 3: mod_base = OTHER; note = 2'-O-methyl modified nucleotide with phosphorothioate linkage
  modified_base 29: mod_base = OTHER; note = 2'-O-methyl modified nucleotide
  modified_base 30: mod_base = OTHER; note = 2'-O-methyl modified nucleotide
  modified_base 31: mod_base = OTHER; note = 2'-O-methyl modified nucleotide
  modified_base 32: mod_base = OTHER; note = 2'-O-methyl modified nucleotide
  modified_base 33: mod_base = OTHER; note = 2'-O-methyl modified nucleotide
  modified_base 34: mod_base = OTHER; note = 2'-O-methyl modified nucleotide
  modified_base 35: mod_base = OTHER; note = 2'-O-methyl modified nucleotide
  modified_base 36: mod_base = OTHER; note = 2'-O-methyl modified nucleotide
  modified_base 37: mod_base = OTHER; note = 2'-O-methyl modified nucleotide
  modified_base 38: mod_base = OTHER; note = 2'-O-methyl modified nucleotide
  modified_base 39: mod_base = OTHER; note = 2'-O-methyl modified nucleotide
  modified_base 40: mod_base = OTHER; note = 2'-O-methyl modified nucleotide
  modified_base 69: mod_base = OTHER; note = 2'-O-methyl modified nucleotide
  modified_base 70: mod_base = OTHER; note = 2'-O-methyl modified nucleotide
  modified_base 71: mod_base = OTHER; note = 2'-O-methyl modified nucleotide
  modified_base 72: mod_base = OTHER; note = 2'-O-methyl modified nucleotide
  modified_base 73: mod_base = OTHER; note = 2'-O-methyl modified nucleotide
  modified_base 74: mod_base = OTHER; note = 2'-O-methyl modified nucleotide
  modified_base 75: mod_base = OTHER; note = 2'-O-methyl modified nucleotide
  modified_base 76: mod_base = OTHER; note = 2'-O-methyl modified nucleotide
  modified_base 77: mod_base = OTHER; note = 2'-O-methyl modified nucleotide
  modified_base 78: mod_base = OTHER; note = 2'-O-methyl modified nucleotide
  modified_base 79: mod_base = OTHER; note = 2'-O-methyl modified nucleotide
  modified_base 80: mod_base = OTHER; note = 2'-O-methyl modified nucleotide
  modified_base 81: mod_base = OTHER; note = 2'-O-methyl modified nucleotide
  modified_base 82: mod_base = OTHER; note = 2'-O-methyl modified nucleotide
  modified_base 83: mod_base = OTHER; note = 2'-O-methyl modified nucleotide
  modified_base 84: mod_base = OTHER; note = 2'-O-methyl modified nucleotide
  modified_base 85: mod_base = OTHER; note = 2'-O-methyl modified nucleotide
  modified_base 86: mod_base = OTHER; note = 2'-O-methyl modified nucleotide
  modified_base 87: mod_base = OTHER; note = 2'-O-methyl modified nucleotide
  modified_base 88: mod_base = OTHER; note = 2'-O-methyl modified nucleotide
  modified_base 89: mod_base = OTHER; note = 2'-O-methyl modified nucleotide
  modified_base 90: mod_base = OTHER; note = 2'-O-methyl modified nucleotide
  modified_base 91: mod_base = OTHER; note = 2'-O-methyl modified nucleotide
  modified_base 92: mod_base = OTHER; note = 2'-O-methyl modified nucleotide
  modified_base 93: mod_base = OTHER; note = 2'-O-methyl modified nucleotide
  modified_base 94: mod_base = OTHER; note = 2'-O-methyl modified nucleotide
  modified_base 95: mod_base = OTHER; note = 2'-O-methyl modified nucleotide
  modified_base 96: mod_base = OTHER; note = 2'-O-methyl modified nucleotide
  modified_base 127: mod_base = OTHER; note = Nucleotide with phosphorothioate linkage
  modified_base 128: mod_base = OTHER; note = 2'-O-methyl modified nucleotide with phosphorothioate linkage
  modified_base 129: mod_base = OTHER; note = 2'-O-methyl modified nucleotide with phosphorothioate linkage
  modified_base 130: mod_base = OTHER; note = 2'-O-methyl modified nucleotide
actcacgctggatagcctccgttttagagctagaaatagcaagttaaaataaggctagtccgttatcaacttgaaaaagtggcaccgagtcggtgctctctttctggcctggataacggctatccagcgt

SEQ ID NO: 17596 - RNA, 129 nt, synthetic construct
  source 1..129: mol_type = other RNA
  modified_base 1: mod_base = OTHER; note = 2'-O-methyl modified nucleotide with phosphorothioate linkage
  modified_base 2: mod_base = OTHER; note = 2'-O-methyl modified nucleotide with phosphorothioate linkage
  modified_base 3: mod_base = OTHER; note = 2'-O-methyl modified nucleotide with phosphorothioate linkage
  modified_base 29: mod_base = OTHER; note = 2'-O-methyl modified nucleotide
  modified_base 30: mod_base = OTHER; note = 2'-O-methyl modified nucleotide
  modified_base 31: mod_base = OTHER; note = 2'-O-methyl modified nucleotide
  modified_base 32: mod_base = OTHER; note = 2'-O-methyl modified nucleotide
  modified_base 33: mod_base = OTHER; note = 2'-O-methyl modified nucleotide
  modified_base 34: mod_base = OTHER; note = 2'-O-methyl modified nucleotide
  modified_base 35: mod_base = OTHER; note = 2'-O-methyl modified nucleotide
  modified_base 36: mod_base = OTHER; note = 2'-O-methyl modified nucleotide
  modified_base 37: mod_base = OTHER; note = 2'-O-methyl modified nucleotide
  modified_base 38: mod_base = OTHER; note = 2'-O-methyl modified nucleotide
  modified_base 39: mod_base = OTHER; note = 2'-O-methyl modified nucleotide
  modified_base 40: mod_base = OTHER; note = 2'-O-methyl modified nucleotide
  modified_base 69: mod_base = OTHER; note = 2'-O-methyl modified nucleotide
  modified_base 70: mod_base = OTHER; note = 2'-O-methyl modified nucleotide
  modified_base 71: mod_base = OTHER; note = 2'-O-methyl modified nucleotide
  modified_base 72: mod_base = OTHER; note = 2'-O-methyl modified nucleotide
  modified_base 73: mod_base = OTHER; note = 2'-O-methyl modified nucleotide
  modified_base 74: mod_base = OTHER; note = 2'-O-methyl modified nucleotide
  modified_base 75: mod_base = OTHER; note = 2'-O-methyl modified nucleotide
  modified_base 76: mod_base = OTHER; note = 2'-O-methyl modified nucleotide
  modified_base 77: mod_base = OTHER; note = 2'-O-methyl modified nucleotide
  modified_base 78: mod_base = OTHER; note = 2'-O-methyl modified nucleotide
  modified_base 79: mod_base = OTHER; note = 2'-O-methyl modified nucleotide
  modified_base 80: mod_base = OTHER; note = 2'-O-methyl modified nucleotide
  modified_base 81: mod_base = OTHER; note = 2'-O-methyl modified nucleotide
  modified_base 82: mod_base = OTHER; note = 2'-O-methyl modified nucleotide
  modified_base 83: mod_base = OTHER; note = 2'-O-methyl modified nucleotide
  modified_base 84: mod_base = OTHER; note = 2'-O-methyl modified nucleotide
  modified_base 85: mod_base = OTHER; note = 2'-O-methyl modified nucleotide
  modified_base 86: mod_base = OTHER; note = 2'-O-methyl modified nucleotide
  modified_base 87: mod_base = OTHER; note = 2'-O-methyl modified nucleotide
  modified_base 88: mod_base = OTHER; note = 2'-O-methyl modified nucleotide
  modified_base 89: mod_base = OTHER; note = 2'-O-methyl modified nucleotide
  modified_base 90: mod_base = OTHER; note = 2'-O-methyl modified nucleotide
  modified_base 91: mod_base = OTHER; note = 2'-O-methyl modified nucleotide
  modified_base 92: mod_base = OTHER; note = 2'-O-methyl modified nucleotide
  modified_base 93: mod_base = OTHER; note = 2'-O-methyl modified nucleotide
  modified_base 94: mod_base = OTHER; note = 2'-O-methyl modified nucleotide
  modified_base 95: mod_base = OTHER; note = 2'-O-methyl modified nucleotide
  modified_base 96: mod_base = OTHER; note = 2'-O-methyl modified nucleotide
  modified_base 126: mod_base = OTHER; note = Nucleotide with phosphorothioate linkage
  modified_base 127: mod_base = OTHER; note = 2'-O-methyl modified nucleotide with phosphorothioate linkage
  modified_base 128: mod_base = OTHER; note = 2'-O-methyl modified nucleotide with phosphorothioate linkage
  modified_base 129: mod_base = OTHER; note = 2'-O-methyl modified nucleotide
actcacgctggatagcctccgttttagagctagaaatagcaagttaaaataaggctagtccgttatcaacttgaaaaagtggcaccgagtcggtgctctctttctggcctggataacggctatccagcg

SEQ ID NO: 17597 - RNA, 128 nt, synthetic construct
  source 1..128: mol_type = other RNA
  modified_base 1: mod_base = OTHER; note = 2'-O-methyl modified nucleotide with phosphorothioate linkage
  modified_base 2: mod_base = OTHER; note = 2'-O-methyl modified nucleotide with phosphorothioate linkage
  modified_base 3: mod_base = OTHER; note = 2'-O-methyl modified nucleotide with phosphorothioate linkage
  modified_base 29: mod_base = OTHER; note = 2'-O-methyl modified nucleotide
  modified_base 30: mod_base = OTHER; note = 2'-O-methyl modified nucleotide
  modified_base 31: mod_base = OTHER; note = 2'-O-methyl modified nucleotide
  modified_base 32: mod_base = OTHER; note = 2'-O-methyl modified nucleotide
  modified_base 33: mod_base = OTHER; note = 2'-O-methyl modified nucleotide
  modified_base 34: mod_base = OTHER; note = 2'-O-methyl modified nucleotide
  modified_base 35: mod_base = OTHER; note = 2'-O-methyl modified nucleotide
  modified_base 36: mod_base = OTHER; note = 2'-O-methyl modified nucleotide
  modified_base 37: mod_base = OTHER; note = 2'-O-methyl modified nucleotide
  modified_base 38: mod_base = OTHER; note = 2'-O-methyl modified nucleotide
  modified_base 39: mod_base = OTHER; note = 2'-O-methyl modified nucleotide
  modified_base 40: mod_base = OTHER; note = 2'-O-methyl modified nucleotide
  modified_base 69: mod_base = OTHER; note = 2'-O-methyl modified nucleotide
  modified_base 70: mod_base = OTHER; note = 2'-O-methyl modified nucleotide
  modified_base 71: mod_base = OTHER; note = 2'-O-methyl modified nucleotide
  modified_base 72: mod_base = OTHER; note = 2'-O-methyl modified nucleotide
  modified_base 73: mod_base = OTHER; note = 2'-O-methyl modified nucleotide
  modified_base 74: mod_base = OTHER; note = 2'-O-methyl modified nucleotide
  modified_base 75: mod_base = OTHER; note = 2'-O-methyl modified nucleotide
  modified_base 76: mod_base = OTHER; note = 2'-O-methyl modified nucleotide
  modified_base 77: mod_base = OTHER; note = 2'-O-methyl modified nucleotide
  modified_base 78: mod_base = OTHER; note = 2'-O-methyl modified nucleotide
  modified_base 79: mod_base = OTHER; note = 2'-O-methyl modified nucleotide
  modified_base 80: mod_base = OTHER; note = 2'-O-methyl modified nucleotide
  modified_base 81: mod_base = OTHER; note = 2'-O-methyl modified nucleotide
  modified_base 82: mod_base = OTHER; note = 2'-O-methyl modified nucleotide
  modified_base 83: mod_base = OTHER; note = 2'-O-methyl modified nucleotide
  modified_base 84: mod_base = OTHER; note = 2'-O-methyl modified nucleotide
  modified_base 85: mod_base = OTHER; note = 2'-O-methyl modified nucleotide
  modified_base 86: mod_base = OTHER; note = 2'-O-methyl modified nucleotide
  modified_base 87: mod_base = OTHER; note = 2'-O-methyl modified nucleotide
  modified_base 88: mod_base = OTHER; note = 2'-O-methyl modified nucleotide
  modified_base 89: mod_base = OTHER; note = 2'-O-methyl modified nucleotide
  modified_base 90: mod_base = OTHER; note = 2'-O-methyl modified nucleotide
  modified_base 91: mod_base = OTHER; note = 2'-O-methyl modified nucleotide
  modified_base 92: mod_base = OTHER; note = 2'-O-methyl modified nucleotide
  modified_base 93: mod_base = OTHER; note = 2'-O-methyl modified nucleotide
  modified_base 94: mod_base = OTHER; note = 2'-O-methyl modified nucleotide
  modified_base 95: mod_base = OTHER; note = 2'-O-methyl modified nucleotide
  modified_base 96: mod_base = OTHER; note = 2'-O-methyl modified nucleotide
  modified_base 125: mod_base = OTHER; note = Nucleotide with phosphorothioate linkage
  modified_base 126: mod_base = OTHER; note = 2'-O-methyl modified nucleotide with phosphorothioate linkage
  modified_base 127: mod_base = OTHER; note = 2'-O-methyl modified nucleotide with phosphorothioate linkage
  modified_base 128: mod_base = OTHER; note = 2'-O-methyl modified nucleotide
actcacgctggatagcctccgttttagagctagaaatagcaagttaaaataaggctagtccgttatcaacttgaaaaagtggcaccgagtcggtgctctctttctggcctggataacggctatccagc

SEQ ID NO: 17598 - RNA, 127 nt, synthetic construct
  source 1..127: mol_type = other RNA
  modified_base 1: mod_base = OTHER; note = 2'-O-methyl modified nucleotide with phosphorothioate linkage
  modified_base 2: mod_base = OTHER; note = 2'-O-methyl modified nucleotide with phosphorothioate linkage
  modified_base 3: mod_base = OTHER; note = 2'-O-methyl modified nucleotide with phosphorothioate linkage
  modified_base 29: mod_base = OTHER; note = 2'-O-methyl modified nucleotide
  modified_base 30: mod_base = OTHER; note = 2'-O-methyl modified nucleotide
  modified_base 31: mod_base = OTHER; note = 2'-O-methyl modified nucleotide
  modified_base 32: mod_base = OTHER; note = 2'-O-methyl modified nucleotide
  modified_base 33: mod_base = OTHER; note = 2'-O-methyl modified nucleotide
  modified_base 34: mod_base = OTHER; note = 2'-O-methyl modified nucleotide
  modified_base 35: mod_base = OTHER; note = 2'-O-methyl modified nucleotide
  modified_base 36: mod_base = OTHER; note = 2'-O-methyl modified nucleotide
  modified_base 37: mod_base = OTHER; note = 2'-O-methyl modified nucleotide
  modified_base 38: mod_base = OTHER; note = 2'-O-methyl modified nucleotide
  modified_base 39: mod_base = OTHER; note = 2'-O-methyl modified nucleotide
  modified_base 40: mod_base = OTHER; note = 2'-O-methyl modified nucleotide
  modified_base 69: mod_base = OTHER; note = 2'-O-methyl modified nucleotide
  modified_base 70: mod_base = OTHER; note = 2'-O-methyl modified nucleotide
  modified_base 71: mod_base = OTHER; note = 2'-O-methyl modified nucleotide
  modified_base 72: mod_base = OTHER; note = 2'-O-methyl modified nucleotide
  modified_base 73: mod_base = OTHER; note = 2'-O-methyl modified nucleotide
  modified_base 74: mod_base = OTHER; note = 2'-O-methyl modified nucleotide
  modified_base 75: mod_base = OTHER; note = 2'-O-methyl modified nucleotide
  modified_base 76: mod_base = OTHER; note = 2'-O-methyl modified nucleotide
  modified_base 77: mod_base = OTHER; note = 2'-O-methyl modified nucleotide
  modified_base 78: mod_base = OTHER; note = 2'-O-methyl modified nucleotide
  modified_base 79: mod_base = OTHER; note = 2'-O-methyl modified nucleotide
  modified_base 80: mod_base = OTHER; note = 2'-O-methyl modified nucleotide
  modified_base 81: mod_base = OTHER; note = 2'-O-methyl modified nucleotide
  modified_base 82: mod_base = OTHER; note = 2'-O-methyl modified nucleotide
  modified_base 83: mod_base = OTHER; note = 2'-O-methyl modified nucleotide
  modified_base 84: mod_base = OTHER; note = 2'-O-methyl modified nucleotide
  modified_base 85: mod_base = OTHER; note = 2'-O-methyl modified nucleotide
  modified_base 86: mod_base = OTHER; note = 2'-O-methyl modified nucleotide
  modified_base 87: mod_base = OTHER; note = 2'-O-methyl modified nucleotide
  modified_base 88: mod_base = OTHER; note = 2'-O-methyl modified nucleotide
  modified_base 89: mod_base = OTHER; note = 2'-O-methyl modified nucleotide
  modified_base 90: mod_base = OTHER; note = 2'-O-methyl modified nucleotide
  modified_base 91: mod_base = OTHER; note = 2'-O-methyl modified nucleotide
  modified_base 92: mod_base = OTHER; note = 2'-O-methyl modified nucleotide
  modified_base 93: mod_base = OTHER; note = 2'-O-methyl modified nucleotide
  modified_base 94: mod_base = OTHER; note = 2'-O-methyl modified nucleotide
  modified_base 95: mod_base = OTHER; note = 2'-O-methyl modified nucleotide
  modified_base 96: mod_base = OTHER; note = 2'-O-methyl modified nucleotide
  modified_base 124: mod_base = OTHER; note = Nucleotide with phosphorothioate linkage
  modified_base 125: mod_base = OTHER; note = 2'-O-methyl modified nucleotide with phosphorothioate linkage
  modified_base 126: mod_base = OTHER; note = 2'-O-methyl modified nucleotide with phosphorothioate linkage
  modified_base 127: mod_base = OTHER; note = 2'-O-methyl modified nucleotide
actcacgctggatagcctccgttttagagctagaaatagcaagttaaaataaggctagtccgttatcaacttgaaaaagtggcaccgagtcggtgctctctttctggcctggataacggctatccag

SEQ ID NO: 17599 - RNA, 126 nt, synthetic construct
  source 1..126: mol_type = other RNA
  modified_base 1: mod_base = OTHER; note = 2'-O-methyl modified nucleotide with phosphorothioate linkage
  modified_base 2: mod_base = OTHER; note = 2'-O-methyl modified nucleotide with phosphorothioate linkage
  modified_base 3: mod_base = OTHER; note = 2'-O-methyl modified nucleotide with phosphorothioate linkage
  modified_base 29: mod_base = OTHER; note = 2'-O-methyl modified nucleotide
  modified_base 30: mod_base = OTHER; note = 2'-O-methyl modified nucleotide
  modified_base 31: mod_base = OTHER; note = 2'-O-methyl modified nucleotide
  modified_base 32: mod_base = OTHER; note = 2'-O-methyl modified nucleotide
  modified_base 33: mod_base = OTHER; note = 2'-O-methyl modified nucleotide
  modified_base 34: mod_base = OTHER; note = 2'-O-methyl modified nucleotide
  modified_base 35: mod_base = OTHER; note = 2'-O-methyl modified nucleotide
  modified_base 36: mod_base = OTHER; note = 2'-O-methyl modified nucleotide
  modified_base 37: mod_base = OTHER; note = 2'-O-methyl modified nucleotide
  modified_base 38: mod_base = OTHER; note = 2'-O-methyl modified nucleotide
  modified_base 39: mod_base = OTHER; note = 2'-O-methyl modified nucleotide
  modified_base 40: mod_base = OTHER; note = 2'-O-methyl modified nucleotide
  modified_base 69: mod_base = OTHER; note = 2'-O-methyl modified nucleotide
  modified_base 70: mod_base = OTHER; note = 2'-O-methyl modified nucleotide
  modified_base 71: mod_base = OTHER; note = 2'-O-methyl modified nucleotide
  modified_base 72: mod_base = OTHER; note = 2'-O-methyl modified nucleotide
  modified_base 73: mod_base = OTHER; note = 2'-O-methyl modified nucleotide
  modified_base 74: mod_base = OTHER; note = 2'-O-methyl modified nucleotide
  modified_base 75: mod_base = OTHER; note = 2'-O-methyl modified nucleotide
  modified_base 76: mod_base = OTHER; note = 2'-O-methyl modified nucleotide
  modified_base 77: mod_base = OTHER; note = 2'-O-methyl modified nucleotide
  modified_base 78: mod_base = OTHER; note = 2'-O-methyl modified nucleotide
  modified_base 79: mod_base = OTHER; note = 2'-O-methyl modified nucleotide
  modified_base 80: mod_base = OTHER; note = 2'-O-methyl modified nucleotide
  modified_base 81: mod_base = OTHER; note = 2'-O-methyl modified nucleotide
  modified_base 82: mod_base = OTHER; note = 2'-O-methyl modified nucleotide
  modified_base 83: mod_base = OTHER; note = 2'-O-methyl modified nucleotide
  modified_base 84: mod_base = OTHER; note = 2'-O-methyl modified nucleotide
  modified_base 85: mod_base = OTHER; note = 2'-O-methyl modified nucleotide
  modified_base 86: mod_base = OTHER; note = 2'-O-methyl modified nucleotide
  modified_base 87: mod_base = OTHER; note = 2'-O-methyl modified nucleotide
  modified_base 88: mod_base = OTHER; note = 2'-O-methyl modified nucleotide
  modified_base 89: mod_base = OTHER; note = 2'-O-methyl modified nucleotide
  modified_base 90: mod_base = OTHER; note = 2'-O-methyl modified nucleotide
  modified_base 91: mod_base = OTHER; note = 2'-O-methyl modified nucleotide
  modified_base 92: mod_base = OTHER; note = 2'-O-methyl modified nucleotide
  modified_base 93: mod_base = OTHER; note = 2'-O-methyl modified nucleotide
  modified_base 94: mod_base = OTHER; note = 2'-O-methyl modified nucleotide
  modified_base 95: mod_base = OTHER; note = 2'-O-methyl modified nucleotide
  modified_base 96: mod_base = OTHER; note = 2'-O-methyl modified nucleotide
  modified_base 123: mod_base = OTHER; note = Nucleotide with phosphorothioate linkage
  modified_base 124: mod_base = OTHER; note = 2'-O-methyl modified nucleotide with phosphorothioate linkage
  modified_base 125: mod_base = OTHER; note = 2'-O-methyl modified nucleotide with phosphorothioate linkage
  modified_base 126: mod_base = OTHER; note = 2'-O-methyl modified nucleotide
actcacgctggatagcctccgttttagagctagaaatagcaagttaaaataaggctagtccgttatcaacttgaaaaagtggcaccgagtcggtgctctctttctggcctggataacggctatcca

SEQ ID NO: 17600 - RNA, 125 nt, synthetic construct
  source 1..125: mol_type = other RNA
  modified_base 1: mod_base = OTHER; note = 2'-O-methyl modified nucleotide with phosphorothioate linkage
  modified_base 2: mod_base = OTHER; note = 2'-O-methyl modified nucleotide with phosphorothioate linkage
  modified_base 3: mod_base = OTHER; note = 2'-O-methyl modified nucleotide with phosphorothioate linkage
  modified_base 29: mod_base = OTHER; note = 2'-O-methyl modified nucleotide
  modified_base 30: mod_base = OTHER; note = 2'-O-methyl modified nucleotide
  modified_base 31: mod_base = OTHER; note = 2'-O-methyl modified nucleotide
  modified_base 32: mod_base = OTHER; note = 2'-O-methyl modified nucleotide
  modified_base 33: mod_base = OTHER; note = 2'-O-methyl modified nucleotide
  modified_base 34: mod_base = OTHER; note = 2'-O-methyl modified nucleotide
  modified_base 35: mod_base = OTHER; note = 2'-O-methyl modified nucleotide
  modified_base 36: mod_base = OTHER; note = 2'-O-methyl modified nucleotide
  modified_base 37: mod_base = OTHER; note = 2'-O-methyl modified nucleotide
  modified_base 38: mod_base = OTHER; note = 2'-O-methyl modified nucleotide
  modified_base 39: mod_base = OTHER; note = 2'-O-methyl modified nucleotide
  modified_base 40: mod_base = OTHER; note = 2'-O-methyl modified nucleotide
  modified_base 69: mod_base = OTHER; note = 2'-O-methyl modified nucleotide
  modified_base 70: mod_base = OTHER; note = 2'-O-methyl modified nucleotide
  modified_base 71: mod_base = OTHER; note = 2'-O-methyl modified nucleotide
  modified_base 72: mod_base = OTHER; note = 2'-O-methyl modified nucleotide
  modified_base 73: mod_base = OTHER; note = 2'-O-methyl modified nucleotide
  modified_base 74: mod_base = OTHER; note = 2'-O-methyl modified nucleotide
  modified_base 75: mod_base = OTHER; note = 2'-O-methyl modified nucleotide
  modified_base 76: mod_base = OTHER; note = 2'-O-methyl modified nucleotide
  modified_base 77: mod_base = OTHER; note = 2'-O-methyl modified nucleotide
  modified_base 78: mod_base = OTHER; note = 2'-O-methyl modified nucleotide
  modified_base 79: mod_base = OTHER; note = 2'-O-methyl modified nucleotide
  modified_base 80: mod_base = OTHER; note = 2'-O-methyl modified nucleotide
  modified_base 81: mod_base = OTHER; note = 2'-O-methyl modified nucleotide
  modified_base 82: mod_base = OTHER; note = 2'-O-methyl modified nucleotide
  modified_base 83: mod_base = OTHER; note = 2'-O-methyl modified nucleotide
  modified_base 84: mod_base = OTHER; note = 2'-O-methyl modified nucleotide
  modified_base 85: mod_base = OTHER; note = 2'-O-methyl modified nucleotide
  modified_base 86: mod_base = OTHER; note = 2'-O-methyl modified nucleotide
  modified_base 87: mod_base = OTHER; note = 2'-O-methyl modified nucleotide
  modified_base 88: mod_base = OTHER; note = 2'-O-methyl modified nucleotide
  modified_base 89: mod_base = OTHER; note = 2'-O-methyl modified nucleotide
  modified_base 90: mod_base = OTHER; note = 2'-O-methyl modified nucleotide
  modified_base 91: mod_base = OTHER; note = 2'-O-methyl modified nucleotide
  modified_base 92: mod_base = OTHER; note = 2'-O-methyl modified nucleotide
  modified_base 93: mod_base = OTHER; note = 2'-O-methyl modified nucleotide
  modified_base 94: mod_base = OTHER; note = 2'-O-methyl modified nucleotide
  modified_base 95: mod_base = OTHER; note = 2'-O-methyl modified nucleotide
  modified_base 96: mod_base = OTHER; note = 2'-O-methyl modified nucleotide
  modified_base 122: mod_base = OTHER; note = Nucleotide with phosphorothioate linkage
  modified_base 123: mod_base = OTHER; note = 2'-O-methyl modified nucleotide with phosphorothioate linkage
  modified_base 124: mod_base = OTHER; note = 2'-O-methyl modified nucleotide with phosphorothioate linkage
  modified_base 125: mod_base = OTHER; note = 2'-O-methyl modified nucleotide
actcacgctggatagcctccgttttagagctagaaatagcaagttaaaataaggctagtccgttatcaacttgaaaaagtggcaccgagtcggtgctctctttctggcctggataacggctatcc

SEQ ID NO: 17601 - RNA, 132 nt, synthetic construct
  source 1..132: mol_type = other RNA
  modified_base 1: mod_base = OTHER; note = 2'-O-methyl modified nucleotide with phosphorothioate linkage
  modified_base 2: mod_base = OTHER; note = 2'-O-methyl modified nucleotide with phosphorothioate linkage
  modified_base 3: mod_base = OTHER; note = 2'-O-methyl modified nucleotide with phosphorothioate linkage
  modified_base 29: mod_base = OTHER; note = 2'-O-methyl modified nucleotide
  modified_base 30: mod_base = OTHER; note = 2'-O-methyl modified nucleotide
  modified_base 31: mod_base = OTHER; note = 2'-O-methyl modified nucleotide
  modified_base 32: mod_base = OTHER; note = 2'-O-methyl modified nucleotide
  modified_base 33: mod_base = OTHER; note = 2'-O-methyl modified nucleotide
  modified_base 34: mod_base = OTHER; note = 2'-O-methyl modified nucleotide
  modified_base 35: mod_base = OTHER; note = 2'-O-methyl modified nucleotide
  modified_base 36: mod_base = OTHER; note = 2'-O-methyl modified nucleotide
  modified_base 37: mod_base = OTHER; note = 2'-O-methyl modified nucleotide
  modified_base 38: mod_base = OTHER; note = 2'-O-methyl modified nucleotide
  modified_base 39: mod_base = OTHER; note = 2'-O-methyl modified nucleotide
  modified_base 40: mod_base = OTHER; note = 2'-O-methyl modified nucleotide
  modified_base 69: mod_base = OTHER; note = 2'-O-methyl modified nucleotide
  modified_base 70: mod_base = OTHER; note = 2'-O-methyl modified nucleotide
  modified_base 71: mod_base = OTHER; note = 2'-O-methyl modified nucleotide
  modified_base 72: mod_base = OTHER; note = 2'-O-methyl modified nucleotide
  modified_base 73: mod_base = OTHER; note = 2'-O-methyl modified nucleotide
  modified_base 74: mod_base = OTHER; note = 2'-O-methyl modified nucleotide
  modified_base 75: mod_base = OTHER; note = 2'-O-methyl modified nucleotide
  modified_base 76: mod_base = OTHER; note = 2'-O-methyl modified nucleotide
  modified_base 77: mod_base = OTHER; note = 2'-O-methyl modified nucleotide
  modified_base 78: mod_base = OTHER; note = 2'-O-methyl modified nucleotide
  modified_base 79: mod_base = OTHER; note = 2'-O-methyl modified nucleotide
  modified_base 80: mod_base = OTHER; note = 2'-O-methyl modified nucleotide
  modified_base 81: mod_base = OTHER; note = 2'-O-methyl modified nucleotide
  modified_base 82: mod_base = OTHER; note = 2'-O-methyl modified nucleotide
  modified_base 83: mod_base = OTHER; note = 2'-O-methyl modified nucleotide
  modified_base 84: mod_base = OTHER; note = 2'-O-methyl modified nucleotide
  modified_base 85: mod_base = OTHER; note = 2'-O-methyl modified nucleotide
  modified_base 86: mod_base = OTHER; note = 2'-O-methyl modified nucleotide
  modified_base 87: mod_base = OTHER; note = 2'-O-methyl modified nucleotide
  modified_base 88: mod_base = OTHER; note = 2'-O-methyl modified nucleotide
  modified_base 89: mod_base = OTHER; note = 2'-O-methyl modified nucleotide
  modified_base 90: mod_base = OTHER; note = 2'-O-methyl modified nucleotide
  modified_base 91: mod_base = OTHER; note = 2'-O-methyl modified nucleotide
  modified_base 92: mod_base = OTHER; note = 2'-O-methyl modified nucleotide
  modified_base 93: mod_base = OTHER; note = 2'-O-methyl modified nucleotide
  modified_base 94: mod_base = OTHER; note = 2'-O-methyl modified nucleotide
  modified_base 95: mod_base = OTHER; note = 2'-O-methyl modified nucleotide
  modified_base 96: mod_base = OTHER; note = 2'-O-methyl modified nucleotide
  modified_base 129: mod_base = OTHER; note = Nucleotide with phosphorothioate linkage
  modified_base 130: mod_base = OTHER; note = 2'-O-methyl modified nucleotide with phosphorothioate linkage
  modified_base 131: mod_base = OTHER; note = 2'-O-methyl modified nucleotide with phosphorothioate linkage
  modified_base 132: mod_base = OTHER; note = 2'-O-methyl modified nucleotide
actcacgctggatagcctccgttttagagctagaaatagcaagttaaaataaggctagtccgttatcaacttgaaaaagtggcaccgagtcggtgctctctctttctggcctggataacggctatccagcgt

SEQ ID NO: 17602 - RNA, 131 nt, synthetic construct
  source 1..131: mol_type = other RNA
  modified_base 1: mod_base = OTHER; note = 2'-O-methyl modified nucleotide with phosphorothioate linkage
  modified_base 2: mod_base = OTHER; note = 2'-O-methyl modified nucleotide with phosphorothioate linkage
  modified_base 3: mod_base = OTHER; note = 2'-O-methyl modified nucleotide with phosphorothioate linkage
  modified_base 29: mod_base = OTHER; note = 2'-O-methyl modified nucleotide
  modified_base 30: mod_base = OTHER; note = 2'-O-methyl modified nucleotide
  modified_base 31: mod_base = OTHER; note = 2'-O-methyl modified nucleotide
  modified_base 32: mod_base = OTHER; note = 2'-O-methyl modified nucleotide
  modified_base 33: mod_base = OTHER; note = 2'-O-methyl modified nucleotide
  modified_base 34: mod_base = OTHER; note = 2'-O-methyl modified nucleotide
  modified_base 35: mod_base = OTHER; note = 2'-O-methyl modified nucleotide
  modified_base 36: mod_base = OTHER; note = 2'-O-methyl modified nucleotide
  modified_base 37: mod_base = OTHER; note = 2'-O-methyl modified nucleotide
  modified_base 38: mod_base = OTHER; note = 2'-O-methyl modified nucleotide
  modified_base 39: mod_base = OTHER; note = 2'-O-methyl modified nucleotide
  modified_base 40: mod_base = OTHER; note = 2'-O-methyl modified nucleotide
  modified_base 69: mod_base = OTHER; note = 2'-O-methyl modified nucleotide
  modified_base 70: mod_base = OTHER; note = 2'-O-methyl modified nucleotide
  modified_base 71: mod_base = OTHER; note = 2'-O-methyl modified nucleotide
  modified_base 72: mod_base = OTHER; note = 2'-O-methyl modified nucleotide
  modified_base 73: mod_base = OTHER; note = 2'-O-methyl modified nucleotide
  modified_base 74: mod_base = OTHER; note = 2'-O-methyl modified nucleotide
  modified_base 75: mod_base = OTHER; note = 2'-O-methyl modified nucleotide
  modified_base 76: mod_base = OTHER; note = 2'-O-methyl modified nucleotide
  modified_base 77: mod_base = OTHER; note = 2'-O-methyl modified nucleotide
  modified_base 78: mod_base = OTHER; note = 2'-O-methyl modified nucleotide
  modified_base 79: mod_base = OTHER; note = 2'-O-methyl modified nucleotide
  modified_base 80: mod_base = OTHER; note = 2'-O-methyl modified nucleotide
  modified_base 81: mod_base = OTHER; note = 2'-O-methyl modified nucleotide
  modified_base 82: mod_base = OTHER; note = 2'-O-methyl modified nucleotide
  modified_base 83: mod_base = OTHER; note = 2'-O-methyl modified nucleotide
  modified_base 84: mod_base = OTHER; note = 2'-O-methyl modified nucleotide
  modified_base 85: mod_base = OTHER; note = 2'-O-methyl modified nucleotide
  modified_base 86: mod_base = OTHER; note = 2'-O-methyl modified nucleotide
  modified_base 87: mod_base = OTHER; note = 2'-O-methyl modified nucleotide
  modified_base 88: mod_base = OTHER; note = 2'-O-methyl modified nucleotide
  modified_base 89: mod_base = OTHER; note = 2'-O-methyl modified nucleotide
  modified_base 90: mod_base = OTHER; note = 2'-O-methyl modified nucleotide
  modified_base 91: mod_base = OTHER; note = 2'-O-methyl modified nucleotide
  modified_base 92: mod_base = OTHER; note = 2'-O-methyl modified nucleotide
  modified_base 93: mod_base = OTHER; note = 2'-O-methyl modified nucleotide
  modified_base 94: mod_base = OTHER; note = 2'-O-methyl modified nucleotide
  modified_base 95: mod_base = OTHER; note = 2'-O-methyl modified nucleotide
  modified_base 96: mod_base = OTHER; note = 2'-O-methyl modified nucleotide
  modified_base 128: mod_base = OTHER; note = Nucleotide with phosphorothioate linkage
  modified_base 129: mod_base = OTHER; note = 2'-O-methyl modified nucleotide with phosphorothioate linkage
  modified_base 130: mod_base = OTHER; note = 2'-O-methyl modified nucleotide with phosphorothioate linkage
  modified_base 131: mod_base = OTHER; note = 2'-O-methyl modified nucleotide
actcacgctggatagcctccgttttagagctagaaatagcaagttaaaataaggctagtccgttatcaacttgaaaaagtggcaccgagtcggtgctctctctttctggcctggataacggctatccagcg

SEQ ID NO: 17603 - RNA, 130 nt, synthetic construct
  source 1..130: mol_type = other RNA
  modified_base 1: mod_base = OTHER; note = 2'-O-methyl modified nucleotide with phosphorothioate linkage
  modified_base 2: mod_base = OTHER; note = 2'-O-methyl modified nucleotide with phosphorothioate linkage
  modified_base 3: mod_base = OTHER; note = 2'-O-methyl modified nucleotide with phosphorothioate linkage
  modified_base 29: mod_base = OTHER; note = 2'-O-methyl modified nucleotide
  modified_base 30: mod_base = OTHER; note = 2'-O-methyl modified nucleotide
  modified_base 31: mod_base = OTHER; note = 2'-O-methyl modified nucleotide
  modified_base 32: mod_base = OTHER; note = 2'-O-methyl modified nucleotide
  modified_base 33: mod_base = OTHER; note = 2'-O-methyl modified nucleotide
  modified_base 34: mod_base = OTHER; note = 2'-O-methyl modified nucleotide
  modified_base 35: mod_base = OTHER; note = 2'-O-methyl modified nucleotide
  modified_base 36: mod_base = OTHER; note = 2'-O-methyl modified nucleotide
  modified_base 37: mod_base = OTHER; note = 2'-O-methyl modified nucleotide
  modified_base 38: mod_base = OTHER; note = 2'-O-methyl modified nucleotide
  modified_base 39: mod_base = OTHER; note = 2'-O-methyl modified nucleotide
  modified_base 40: mod_base = OTHER; note = 2'-O-methyl modified nucleotide
  modified_base 69: mod_base = OTHER; note = 2'-O-methyl modified nucleotide
  modified_base 70: mod_base = OTHER; note = 2'-O-methyl modified nucleotide
  modified_base 71: mod_base = OTHER; note = 2'-O-methyl modified nucleotide
  modified_base 72: mod_base = OTHER; note = 2'-O-methyl modified nucleotide
  modified_base 73: mod_base = OTHER; note = 2'-O-methyl modified nucleotide
  modified_base 74: mod_base = OTHER; note = 2'-O-methyl modified nucleotide
  modified_base 75: mod_base = OTHER; note = 2'-O-methyl modified nucleotide
  modified_base 76: mod_base = OTHER; note = 2'-O-methyl modified nucleotide
  modified_base 77: mod_base = OTHER; note = 2'-O-methyl modified nucleotide
  modified_base 78: mod_base = OTHER; note = 2'-O-methyl modified nucleotide
  modified_base 79: mod_base = OTHER; note = 2'-O-methyl modified nucleotide
  modified_base 80: mod_base = OTHER; note = 2'-O-methyl modified nucleotide
  modified_base 81: mod_base = OTHER; note = 2'-O-methyl modified nucleotide
  modified_base 82: mod_base = OTHER; note = 2'-O-methyl modified nucleotide
  modified_base 83: mod_base = OTHER; note = 2'-O-methyl modified nucleotide
  modified_base 84: mod_base = OTHER; note = 2'-O-methyl modified nucleotide
  modified_base 85: mod_base = OTHER; note = 2'-O-methyl modified nucleotide
  modified_base 86: mod_base = OTHER; note = 2'-O-methyl modified nucleotide
  modified_base 87: mod_base = OTHER; note = 2'-O-methyl modified nucleotide
  modified_base 88: mod_base = OTHER; note = 2'-O-methyl modified nucleotide
  modified_base 89: mod_base = OTHER; note = 2'-O-methyl modified nucleotide
  modified_base 90: mod_base = OTHER; note = 2'-O-methyl modified nucleotide
  modified_base 91: mod_base = OTHER; note = 2'-O-methyl modified nucleotide
  modified_base 92: mod_base = OTHER; note = 2'-O-methyl modified nucleotide
  modified_base 93: mod_base = OTHER; note = 2'-O-methyl modified nucleotide
  modified_base 94: mod_base = OTHER; note = 2'-O-methyl modified nucleotide
  modified_base 95: mod_base = OTHER; note = 2'-O-methyl modified nucleotide
  modified_base 96: mod_base = OTHER; note = 2'-O-methyl modified nucleotide
  modified_base 127: mod_base = OTHER; note = Nucleotide with phosphorothioate linkage
  modified_base 128: mod_base = OTHER; note = 2'-O-methyl modified nucleotide with phosphorothioate linkage
  modified_base 129: mod_base = OTHER; note = 2'-O-methyl modified nucleotide with phosphorothioate linkage
  modified_base 130: mod_base = OTHER; note = 2'-O-methyl modified nucleotide
actcacgctggatagcctccgttttagagctagaaatagcaagttaaaataaggctagtccgttatcaacttgaaaaagtggcaccgagtcggtgctctctctttctggcctggataacggctatccagc

SEQ ID NO: 17604 - RNA, 129 nt, synthetic construct
  source 1..129: mol_type = other RNA
  modified_base 1: mod_base = OTHER; note = 2'-O-methyl modified nucleotide with phosphorothioate linkage
  modified_base 2: mod_base = OTHER; note = 2'-O-methyl modified nucleotide with phosphorothioate linkage
  modified_base 3: mod_base = OTHER; note = 2'-O-methyl modified nucleotide with phosphorothioate linkage
  modified_base 29: mod_base = OTHER; note = 2'-O-methyl modified nucleotide
  modified_base 30: mod_base = OTHER; note = 2'-O-methyl modified nucleotide
  modified_base 31: mod_base = OTHER; note = 2'-O-methyl modified nucleotide
  modified_base 32: mod_base = OTHER; note = 2'-O-methyl modified nucleotide
  modified_base 33: mod_base = OTHER; note = 2'-O-methyl modified nucleotide
  modified_base 34: mod_base = OTHER; note = 2'-O-methyl modified nucleotide
  modified_base 35: mod_base = OTHER; note = 2'-O-methyl modified nucleotide
  modified_base 36: mod_base = OTHER; note = 2'-O-methyl modified nucleotide
  modified_base 37: mod_base = OTHER; note = 2'-O-methyl modified nucleotide
  modified_base 38: mod_base = OTHER; note = 2'-O-methyl modified nucleotide
  modified_base 39: mod_base = OTHER; note = 2'-O-methyl modified nucleotide
  modified_base 40: mod_base = OTHER; note = 2'-O-methyl modified nucleotide
  modified_base 69: mod_base = OTHER; note = 2'-O-methyl modified nucleotide
  modified_base 70: mod_base = OTHER; note = 2'-O-methyl modified nucleotide
  modified_base 71: mod_base = OTHER; note = 2'-O-methyl modified nucleotide
  modified_base 72: mod_base = OTHER; note = 2'-O-methyl modified nucleotide
  modified_base 73: mod_base = OTHER; note = 2'-O-methyl modified nucleotide
  modified_base 74: mod_base = OTHER; note = 2'-O-methyl modified nucleotide
  modified_base 75: mod_base = OTHER; note = 2'-O-methyl modified nucleotide
  modified_base 76: mod_base = OTHER; note = 2'-O-methyl modified nucleotide
  modified_base 77: mod_base = OTHER; note = 2'-O-methyl modified nucleotide
  modified_base 78: mod_base = OTHER; note = 2'-O-methyl modified nucleotide
  modified_base 79: mod_base = OTHER; note = 2'-O-methyl modified nucleotide
  modified_base 80: mod_base = OTHER; note = 2'-O-methyl modified nucleotide
  modified_base 81: mod_base = OTHER; note = 2'-O-methyl modified nucleotide
  modified_base 82: mod_base = OTHER; note = 2'-O-methyl modified nucleotide
  modified_base 83: mod_base = OTHER; note = 2'-O-methyl modified nucleotide
  modified_base 84: mod_base = OTHER; note = 2'-O-methyl modified nucleotide
  modified_base 85: mod_base = OTHER; note = 2'-O-methyl modified nucleotide
  modified_base 86: mod_base = OTHER; note = 2'-O-methyl modified nucleotide
  modified_base 87: mod_base = OTHER; note = 2'-O-methyl modified nucleotide
  modified_base 88: mod_base = OTHER; note = 2'-O-methyl modified nucleotide
  modified_base 89: mod_base = OTHER; note = 2'-O-methyl modified nucleotide
  modified_base 90: mod_base = OTHER; note = 2'-O-methyl modified nucleotide
  modified_base 91: mod_base = OTHER; note = 2'-O-methyl modified nucleotide
  modified_base 92: mod_base = OTHER; note = 2'-O-methyl modified nucleotide
  modified_base 93: mod_base = OTHER; note = 2'-O-methyl modified nucleotide
  modified_base 94: mod_base = OTHER; note = 2'-O-methyl modified nucleotide
  modified_base 95: mod_base = OTHER; note = 2'-O-methyl modified nucleotide
  modified_base 96: mod_base = OTHER; note = 2'-O-methyl modified nucleotide
  modified_base 126: mod_base = OTHER; note = Nucleotide with phosphorothioate linkage
  modified_base 127: mod_base = OTHER; note = 2'-O-methyl modified nucleotide with phosphorothioate linkage
  modified_base 128: mod_base = OTHER; note = 2'-O-methyl modified nucleotide with phosphorothioate linkage
  modified_base 129: mod_base = OTHER; note = 2'-O-methyl modified nucleotide
actcacgctggatagcctccgttttagagctagaaatagcaagttaaaataaggctagtccgttatcaacttgaaaaagtggcaccgagtcggtgctctctctttctggcctggataacggctatccag

SEQ ID NO: 17605 - RNA, 128 nt, synthetic construct
  source 1..128: mol_type = other RNA
  modified_base 1: mod_base = OTHER; note = 2'-O-methyl modified nucleotide with phosphorothioate linkage
  modified_base 2: mod_base = OTHER; note = 2'-O-methyl modified nucleotide with phosphorothioate linkage
  modified_base 3: mod_base = OTHER; note = 2'-O-methyl modified nucleotide with phosphorothioate linkage
  modified_base 29: mod_base = OTHER; note = 2'-O-methyl modified nucleotide
  modified_base 30: mod_base = OTHER; note = 2'-O-methyl modified nucleotide
  modified_base 31: mod_base = OTHER; note = 2'-O-methyl modified nucleotide
  modified_base 32: mod_base = OTHER; note = 2'-O-methyl modified nucleotide
  modified_base 33: mod_base = OTHER; note = 2'-O-methyl modified nucleotide
  modified_base 34: mod_base = OTHER; note = 2'-O-methyl modified nucleotide
  modified_base 35: mod_base = OTHER; note = 2'-O-methyl modified nucleotide
  modified_base 36: mod_base = OTHER; note = 2'-O-methyl modified nucleotide
  modified_base 37: mod_base = OTHER; note = 2'-O-methyl modified nucleotide
  modified_base 38: mod_base = OTHER; note = 2'-O-methyl modified nucleotide
  modified_base 39: mod_base = OTHER; note = 2'-O-methyl modified nucleotide
  modified_base 40: mod_base = OTHER; note = 2'-O-methyl modified nucleotide
  modified_base 69: mod_base = OTHER; note = 2'-O-methyl modified nucleotide
  modified_base 70: mod_base = OTHER; note = 2'-O-methyl modified nucleotide
  modified_base 71: mod_base = OTHER; note = 2'-O-methyl modified nucleotide
  modified_base 72: mod_base = OTHER; note = 2'-O-methyl modified nucleotide
  modified_base 73: mod_base = OTHER; note = 2'-O-methyl modified nucleotide
  modified_base 74: mod_base = OTHER; note = 2'-O-methyl modified nucleotide
  modified_base 75: mod_base = OTHER; note = 2'-O-methyl modified nucleotide
  modified_base 76: mod_base = OTHER; note = 2'-O-methyl modified nucleotide
  modified_base 77: mod_base = OTHER; note = 2'-O-methyl modified nucleotide
  modified_base 78: mod_base = OTHER; note = 2'-O-methyl modified nucleotide
  modified_base 79: mod_base = OTHER; note = 2'-O-methyl modified nucleotide
  modified_base 80: mod_base = OTHER; note = 2'-O-methyl modified nucleotide
  modified_base 81: mod_base = OTHER; note = 2'-O-methyl modified nucleotide
  modified_base 82: mod_base = OTHER; note = 2'-O-methyl modified nucleotide
  modified_base 83: mod_base = OTHER; note = 2'-O-methyl modified nucleotide
  modified_base 84: mod_base = OTHER; note = 2'-O-methyl modified nucleotide
  modified_base 85: mod_base = OTHER; note = 2'-O-methyl modified nucleotide
  modified_base 86: mod_base = OTHER; note = 2'-O-methyl modified nucleotide
  modified_base 87: mod_base = OTHER; note = 2'-O-methyl modified nucleotide
  modified_base 88: mod_base = OTHER; note = 2'-O-methyl modified nucleotide
  modified_base 89: mod_base = OTHER; note = 2'-O-methyl modified nucleotide
  modified_base 90: mod_base = OTHER; note = 2'-O-methyl modified nucleotide
  modified_base 91: mod_base = OTHER; note = 2'-O-methyl modified nucleotide
  modified_base 92: mod_base = OTHER; note = 2'-O-methyl modified nucleotide
  modified_base 93: mod_base = OTHER; note = 2'-O-methyl modified nucleotide
  modified_base 94: mod_base = OTHER; note = 2'-O-methyl modified nucleotide
  modified_base 95: mod_base = OTHER; note = 2'-O-methyl modified nucleotide
  modified_base 96: mod_base = OTHER; note = 2'-O-methyl modified nucleotide
  modified_base 125: mod_base = OTHER; note = Nucleotide with phosphorothioate linkage
  modified_base 126: mod_base = OTHER; note = 2'-O-methyl modified nucleotide with phosphorothioate linkage
  modified_base 127: mod_base = OTHER; note = 2'-O-methyl modified nucleotide with phosphorothioate linkage
  modified_base 128: mod_base = OTHER; note = 2'-O-methyl modified nucleotide
actcacgctggatagcctccgttttagagctagaaatagcaagttaaaataaggctagtccgttatcaacttgaaaaagtggcaccgagtcggtgctctctctttctggcctggataacggctatcca

SEQ ID NO: 17606 - RNA, 127 nt, synthetic construct
  source 1..127: mol_type = other RNA
  modified_base 1: mod_base = OTHER; note = 2'-O-methyl modified nucleotide with phosphorothioate linkage
  modified_base 2: mod_base = OTHER; note = 2'-O-methyl modified nucleotide with phosphorothioate linkage
  modified_base 3: mod_base = OTHER; note = 2'-O-methyl modified nucleotide with phosphorothioate linkage
  modified_base 29: mod_base = OTHER; note = 2'-O-methyl modified nucleotide
  modified_base 30: mod_base = OTHER; note = 2'-O-methyl modified nucleotide
  modified_base 31: mod_base = OTHER; note = 2'-O-methyl modified nucleotide
  modified_base 32: mod_base = OTHER; note = 2'-O-methyl modified nucleotide
  modified_base 33: mod_base = OTHER; note = 2'-O-methyl modified nucleotide
  modified_base 34: mod_base = OTHER; note = 2'-O-methyl modified nucleotide
  modified_base 35: mod_base = OTHER; note = 2'-O-methyl modified nucleotide
  modified_base 36: mod_base = OTHER; note = 2'-O-methyl modified nucleotide
  modified_base 37: mod_base = OTHER; note = 2'-O-methyl modified nucleotide
  modified_base 38: mod_base = OTHER; note = 2'-O-methyl modified nucleotide
  modified_base 39: mod_base = OTHER; note = 2'-O-methyl modified nucleotide
  modified_base 40: mod_base = OTHER; note = 2'-O-methyl modified nucleotide
  modified_base 69: mod_base = OTHER; note = 2'-O-methyl modified nucleotide
  modified_base 70: mod_base = OTHER; note = 2'-O-methyl modified nucleotide
  modified_base 71: mod_base = OTHER; note = 2'-O-methyl modified nucleotide
  modified_base 72: mod_base = OTHER; note = 2'-O-methyl modified nucleotide
  modified_base 73: mod_base = OTHER; note = 2'-O-methyl modified nucleotide
  modified_base 74: mod_base = OTHER; note = 2'-O-methyl modified nucleotide
  modified_base 75: mod_base = OTHER; note = 2'-O-methyl modified nucleotide
  modified_base 76: mod_base = OTHER; note = 2'-O-methyl modified nucleotide
  modified_base 77: mod_base = OTHER; note = 2'-O-methyl modified nucleotide
  modified_base 78: mod_base = OTHER; note = 2'-O-methyl modified nucleotide
  modified_base 79: mod_base = OTHER; note = 2'-O-methyl modified nucleotide
  modified_base 80: mod_base = OTHER; note = 2'-O-methyl modified nucleotide
  modified_base 81: mod_base = OTHER; note = 2'-O-methyl modified nucleotide
  modified_base 82: mod_base = OTHER; note = 2'-O-methyl modified nucleotide
  modified_base 83: mod_base = OTHER; note = 2'-O-methyl modified nucleotide
  modified_base 84: mod_base = OTHER; note = 2'-O-methyl modified nucleotide
  modified_base 85: mod_base = OTHER; note = 2'-O-methyl modified nucleotide
  modified_base 86: mod_base = OTHER; note = 2'-O-methyl modified nucleotide
  modified_base 87: mod_base = OTHER; note = 2'-O-methyl modified nucleotide
  modified_base 88: mod_base = OTHER; note = 2'-O-methyl modified nucleotide
  modified_base 89: mod_base = OTHER; note = 2'-O-methyl modified nucleotide
  modified_base 90: mod_base = OTHER; note = 2'-O-methyl modified nucleotide
  modified_base 91: mod_base = OTHER; note = 2'-O-methyl modified nucleotide
  modified_base 92: mod_base = OTHER; note = 2'-O-methyl modified nucleotide
  modified_base 93: mod_base = OTHER; note = 2'-O-methyl modified nucleotide
  modified_base 94: mod_base = OTHER; note = 2'-O-methyl modified nucleotide
  modified_base 95: mod_base = OTHER; note = 2'-O-methyl modified nucleotide
  modified_base 96: mod_base = OTHER; note = 2'-O-methyl modified nucleotide
  modified_base 124: mod_base = OTHER; note = Nucleotide with phosphorothioate linkage
  modified_base 125: mod_base = OTHER; note = 2'-O-methyl modified nucleotide with phosphorothioate linkage
  modified_base 126: mod_base = OTHER; note = 2'-O-methyl modified nucleotide with phosphorothioate linkage
  modified_base 127: mod_base = OTHER; note = 2'-O-methyl modified nucleotide
actcacgctggatagcctccgttttagagctagaaatagcaagttaaaataaggctagtccgttatcaacttgaaaaagtggcaccgagtcggtgctctctctttctggcctggataacggctatcc

SEQ ID NO: 17607 - RNA, 121 nt, synthetic construct
  source 1..121: mol_type = other RNA
  modified_base 1: mod_base = OTHER; note = 2'-O-methyl modified nucleotide with phosphorothioate linkage
  modified_base 2: mod_base = OTHER; note = 2'-O-methyl modified nucleotide with phosphorothioate linkage
  modified_base 3: mod_base = OTHER; note = 2'-O-methyl modified nucleotide with phosphorothioate linkage
  modified_base 29: mod_base = OTHER; note = 2'-O-methyl modified nucleotide
  modified_base 30: mod_base = OTHER; note = 2'-O-methyl modified nucleotide
  modified_base 31: mod_base = OTHER; note = 2'-O-methyl modified nucleotide
  modified_base 32: mod_base = OTHER; note = 2'-O-methyl modified nucleotide
  modified_base 33: mod_base = OTHER; note = 2'-O-methyl modified nucleotide
  modified_base 34: mod_base = OTHER; note = 2'-O-methyl modified nucleotide
  modified_base 35: mod_base = OTHER; note = 2'-O-methyl modified nucleotide
  modified_base 36: mod_base = OTHER; note = 2'-O-methyl modified nucleotide
  modified_base 37: mod_base = OTHER; note = 2'-O-methyl modified nucleotide
  modified_base 38: mod_base = OTHER; note = 2'-O-methyl modified nucleotide
  modified_base 39: mod_base = OTHER; note = 2'-O-methyl modified nucleotide
  modified_base 40: mod_base = OTHER; note = 2'-O-methyl modified nucleotide
  modified_base 69: mod_base = OTHER; note = 2'-O-methyl modified nucleotide
  modified_base 70: mod_base = OTHER; note = 2'-O-methyl modified nucleotide
  modified_base 71: mod_base = OTHER; note = 2'-O-methyl modified nucleotide
  modified_base 72: mod_base = OTHER; note = 2'-O-methyl modified nucleotide
  modified_base 73: mod_base = OTHER; note = 2'-O-methyl modified nucleotide
  modified_base 74: mod_base = OTHER; note = 2'-O-methyl modified nucleotide
  modified_base 75: mod_base = OTHER; note = 2'-O-methyl modified nucleotide
  modified_base 76: mod_base = OTHER; note = 2'-O-methyl modified nucleotide
  modified_base 77: mod_base = OTHER; note = 2'-O-methyl modified nucleotide
  modified_base 78: mod_base = OTHER; note = 2'-O-methyl modified nucleotide
  modified_base 79: mod_base = OTHER; note = 2'-O-methyl modified nucleotide
  modified_base 80: mod_base = OTHER; note = 2'-O-methyl modified nucleotide
  modified_base 81: mod_base = OTHER; note = 2'-O-methyl modified nucleotide
  modified_base 82: mod_base = OTHER; note = 2'-O-methyl modified nucleotide
  modified_base 83: mod_base = OTHER; note = 2'-O-methyl modified nucleotide
  modified_base 84: mod_base = OTHER; note = 2'-O-methyl modified nucleotide
  modified_base 85: mod_base = OTHER; note = 2'-O-methyl modified nucleotide
  modified_base 86: mod_base = OTHER; note = 2'-O-methyl modified nucleotide
  modified_base 87: mod_base = OTHER; note = 2'-O-methyl modified nucleotide
  modified_base 88: mod_base = OTHER; note = 2'-O-methyl modified nucleotide
  modified_base 89: mod_base = OTHER; note = 2'-O-methyl modified nucleotide
  modified_base 90: mod_base = OTHER; note = 2'-O-methyl modified nucleotide
  modified_base 91: mod_base = OTHER; note = 2'-O-methyl modified nucleotide
  modified_base 92: mod_base = OTHER; note = 2'-O-methyl modified nucleotide
  modified_base 93: mod_base = OTHER; note = 2'-O-methyl modified nucleotide
  modified_base 94: mod_base = OTHER; note = 2'-O-methyl modified nucleotide
  modified_base 95: mod_base = OTHER; note = 2'-O-methyl modified nucleotide
  modified_base 96: mod_base = OTHER; note = 2'-O-methyl modified nucleotide
  modified_base 118: mod_base = OTHER; note = Nucleotide with phosphorothioate linkage
  modified_base 119: mod_base = OTHER; note = 2'-O-methyl modified nucleotide with phosphorothioate linkage
  modified_base 120: mod_base = OTHER; note = 2'-O-methyl modified nucleotide with phosphorothioate linkage
  modified_base 121: mod_base = OTHER; note = 2'-O-methyl modified nucleotide
actcacgctggatagcctccgttttagagctagaaatagcaagttaaaataaggctagtccgttatcaacttgaaaaagtggcaccgagtcggtgcgcctggatgatgggctatccagcgt

SEQ ID NO: 17608 - RNA, 120 nt, synthetic construct
  source 1..120: mol_type = other RNA
  modified_base 1: mod_base = OTHER; note = 2'-O-methyl modified nucleotide with phosphorothioate linkage
  modified_base 2: mod_base = OTHER; note = 2'-O-methyl modified nucleotide with phosphorothioate linkage
  modified_base 3: mod_base = OTHER; note = 2'-O-methyl modified nucleotide with phosphorothioate linkage
  modified_base 29: mod_base = OTHER; note = 2'-O-methyl modified nucleotide
  modified_base 30: mod_base = OTHER; note = 2'-O-methyl modified nucleotide
  modified_base 31: mod_base = OTHER; note = 2'-O-methyl modified nucleotide
  modified_base 32: mod_base = OTHER; note = 2'-O-methyl modified nucleotide
  modified_base 33: mod_base = OTHER; note = 2'-O-methyl modified nucleotide
  modified_base 34: mod_base = OTHER; note = 2'-O-methyl modified nucleotide
  modified_base 35: mod_base = OTHER; note = 2'-O-methyl modified nucleotide
  modified_base 36: mod_base = OTHER; note = 2'-O-methyl modified nucleotide
  modified_base 37: mod_base = OTHER; note = 2'-O-methyl modified nucleotide
  modified_base 38: mod_base = OTHER; note = 2'-O-methyl modified nucleotide
  modified_base 39: mod_base = OTHER; note = 2'-O-methyl modified nucleotide
  modified_base 40: mod_base = OTHER; note = 2'-O-methyl modified nucleotide
  modified_base 69: mod_base = OTHER; note = 2'-O-methyl modified nucleotide
  modified_base 70: mod_base = OTHER; note = 2'-O-methyl modified nucleotide
  modified_base 71: mod_base = OTHER; note = 2'-O-methyl modified nucleotide
  modified_base 72: mod_base = OTHER; note = 2'-O-methyl modified nucleotide
  modified_base 73: mod_base = OTHER; note = 2'-O-methyl modified nucleotide
  modified_base 74: mod_base = OTHER; note = 2'-O-methyl modified nucleotide
  modified_base 75: mod_base = OTHER; note = 2'-O-methyl modified nucleotide
  modified_base 76: mod_base = OTHER; note = 2'-O-methyl modified nucleotide
  modified_base 77: mod_base = OTHER; note = 2'-O-methyl modified nucleotide
  modified_base 78: mod_base = OTHER; note = 2'-O-methyl modified nucleotide
  modified_base 79: mod_base = OTHER; note = 2'-O-methyl modified nucleotide
  modified_base 80: mod_base = OTHER; note = 2'-O-methyl modified nucleotide
  modified_base 81: mod_base = OTHER; note = 2'-O-methyl modified nucleotide
  modified_base 82: mod_base = OTHER; note = 2'-O-methyl modified nucleotide
  modified_base 83: mod_base = OTHER; note = 2'-O-methyl modified nucleotide
  modified_base 84: mod_base = OTHER; note = 2'-O-methyl modified nucleotide
  modified_base 85: mod_base = OTHER; note = 2'-O-methyl modified nucleotide
  modified_base 86: mod_base = OTHER; note = 2'-O-methyl modified nucleotide
  modified_base 87: mod_base = OTHER; note = 2'-O-methyl modified nucleotide
  modified_base 88: mod_base = OTHER; note = 2'-O-methyl modified nucleotide
  modified_base 89: mod_base = OTHER; note = 2'-O-methyl modified nucleotide
  modified_base 90: mod_base = OTHER; note = 2'-O-methyl modified nucleotide
  modified_base 91: mod_base = OTHER; note = 2'-O-methyl modified nucleotide
  modified_base 92: mod_base = OTHER; note = 2'-O-methyl modified nucleotide
  modified_base 93: mod_base = OTHER; note = 2'-O-methyl modified nucleotide
  modified_base 94: mod_base = OTHER; note = 2'-O-methyl modified nucleotide
  modified_base 95: mod_base = OTHER; note = 2'-O-methyl modified nucleotide
  modified_base 96: mod_base = OTHER; note = 2'-O-methyl modified nucleotide
  modified_base 117: mod_base = OTHER; note = Nucleotide with phosphorothioate linkage
  modified_base 118: mod_base = OTHER; note = 2'-O-methyl modified nucleotide with phosphorothioate linkage
  modified_base 119: mod_base = OTHER; note = 2'-O-methyl modified nucleotide with phosphorothioate linkage
  modified_base 120: mod_base = OTHER; note = 2'-O-methyl modified nucleotide
actcacgctggatagcctccgttttagagctagaaatagcaagttaaaataaggctagtccgttatcaacttgaaaaagtggcaccgagtcggtgcgcctggatgatgggctatccagcg

SEQ ID NO: 17609 - RNA, 119 nt, synthetic construct
  source 1..119: mol_type = other RNA
  modified_base 1: mod_base = OTHER; note = 2'-O-methyl modified nucleotide with phosphorothioate linkage
  modified_base 2: mod_base = OTHER; note = 2'-O-methyl modified nucleotide with phosphorothioate linkage
  modified_base 3: mod_base = OTHER; note = 2'-O-methyl modified nucleotide with phosphorothioate linkage
  modified_base 29: mod_base = OTHER; note = 2'-O-methyl modified nucleotide
  modified_base 30: mod_base = OTHER; note = 2'-O-methyl modified nucleotide
  modified_base 31: mod_base = OTHER; note = 2'-O-methyl modified nucleotide
  modified_base 32: mod_base = OTHER; note = 2'-O-methyl modified nucleotide
  modified_base 33: mod_base = OTHER; note = 2'-O-methyl modified nucleotide
  modified_base 34: mod_base = OTHER; note = 2'-O-methyl modified nucleotide
  modified_base 35: mod_base = OTHER; note = 2'-O-methyl modified nucleotide
  modified_base 36: mod_base = OTHER; note = 2'-O-methyl modified nucleotide
  modified_base 37: mod_base = OTHER; note = 2'-O-methyl modified nucleotide
  modified_base 38: mod_base = OTHER; note = 2'-O-methyl modified nucleotide
  modified_base 39: mod_base = OTHER; note = 2'-O-methyl modified nucleotide
  modified_base 40: mod_base = OTHER; note = 2'-O-methyl modified nucleotide
  modified_base 69: mod_base = OTHER; note = 2'-O-methyl modified nucleotide
  modified_base 70: mod_base = OTHER; note = 2'-O-methyl modified nucleotide
  modified_base 71: mod_base = OTHER; note = 2'-O-methyl modified nucleotide
  modified_base 72: mod_base = OTHER; note = 2'-O-methyl modified nucleotide
  modified_base 73: mod_base = OTHER; note = 2'-O-methyl modified nucleotide
  modified_base 74: mod_base = OTHER; note = 2'-O-methyl modified nucleotide
  modified_base 75: mod_base = OTHER; note = 2'-O-methyl modified nucleotide
  modified_base 76: mod_base = OTHER; note = 2'-O-methyl modified nucleotide
  modified_base 77: mod_base = OTHER; note = 2'-O-methyl modified nucleotide
  modified_base 78: mod_base = OTHER; note = 2'-O-methyl modified nucleotide
  modified_base 79: mod_base = OTHER; note = 2'-O-methyl modified nucleotide
  modified_base 80: mod_base = OTHER; note = 2'-O-methyl modified nucleotide
  modified_base 81: mod_base = OTHER; note = 2'-O-methyl modified nucleotide
  modified_base 82: mod_base = OTHER; note = 2'-O-methyl modified nucleotide
  modified_base 83: mod_base = OTHER; note = 2'-O-methyl modified nucleotide
  modified_base 84: mod_base = OTHER; note = 2'-O-methyl modified nucleotide
  modified_base 85: mod_base = OTHER; note = 2'-O-methyl modified nucleotide
  modified_base 86: mod_base = OTHER; note = 2'-O-methyl modified nucleotide
  modified_base 87: mod_base = OTHER; note = 2'-O-methyl modified nucleotide
  modified_base 88: mod_base = OTHER; note = 2'-O-methyl modified nucleotide
  modified_base 89: mod_base = OTHER; note = 2'-O-methyl modified nucleotide
  modified_base 90: mod_base = OTHER; note = 2'-O-methyl modified nucleotide
  modified_base 91: mod_base = OTHER; note = 2'-O-methyl modified nucleotide
  modified_base 92: mod_base = OTHER; note = 2'-O-methyl modified nucleotide
  modified_base 93: mod_base = OTHER; note = 2'-O-methyl modified nucleotide
  modified_base 94: mod_base = OTHER; note = 2'-O-methyl modified nucleotide
  modified_base 95: mod_base = OTHER; note = 2'-O-methyl modified nucleotide
  modified_base 96: mod_base = OTHER; note = 2'-O-methyl modified nucleotide
  modified_base 116: mod_base = OTHER; note = Nucleotide with phosphorothioate linkage
  modified_base 117: mod_base = OTHER; note = 2'-O-methyl modified nucleotide with phosphorothioate linkage
  modified_base 118: mod_base = OTHER; note = 2'-O-methyl modified nucleotide with phosphorothioate linkage
  modified_base 119: mod_base = OTHER; note = 2'-O-methyl modified nucleotide
actcacgctggatagcctccgttttagagctagaaatagcaagttaaaataaggctagtccgttatcaacttgaaaaagtggcaccgagtcggtgcgcctggatgatgggctatccagc

SEQ ID NO: 17610 - RNA, 118 nt, synthetic construct
  source 1..118: mol_type = other RNA
  modified_base 1: mod_base = OTHER; note = 2'-O-methyl modified nucleotide with phosphorothioate linkage
  modified_base 2: mod_base = OTHER; note = 2'-O-methyl modified nucleotide with phosphorothioate linkage
  modified_base 3: mod_base = OTHER; note = 2'-O-methyl modified nucleotide with phosphorothioate linkage
  modified_base 29: mod_base = OTHER; note = 2'-O-methyl modified nucleotide
  modified_base 30: mod_base = OTHER; note = 2'-O-methyl modified nucleotide
  modified_base 31: mod_base = OTHER; note = 2'-O-methyl modified nucleotide
  modified_base 32: mod_base = OTHER; note = 2'-O-methyl modified nucleotide
  modified_base 33: mod_base = OTHER; note = 2'-O-methyl modified nucleotide
  modified_base 34: mod_base = OTHER; note = 2'-O-methyl modified nucleotide
  modified_base 35: mod_base = OTHER; note = 2'-O-methyl modified nucleotide
  modified_base 36: mod_base = OTHER; note = 2'-O-methyl modified nucleotide
  modified_base 37: mod_base = OTHER; note = 2'-O-methyl modified nucleotide
  modified_base 38: mod_base = OTHER; note = 2'-O-methyl modified nucleotide
  modified_base 39: mod_base = OTHER; note = 2'-O-methyl modified nucleotide
  modified_base 40: mod_base = OTHER; note = 2'-O-methyl modified nucleotide
  modified_base 69: mod_base = OTHER; note = 2'-O-methyl modified nucleotide
  modified_base 70: mod_base = OTHER; note = 2'-O-methyl modified nucleotide
  modified_base 71: mod_base = OTHER; note = 2'-O-methyl modified nucleotide
  modified_base 72: mod_base = OTHER; note = 2'-O-methyl modified nucleotide
  modified_base 73: mod_base = OTHER; note = 2'-O-methyl modified nucleotide
  modified_base 74: mod_base = OTHER; note = 2'-O-methyl modified nucleotide
  modified_base 75: mod_base = OTHER; note = 2'-O-methyl modified nucleotide
  modified_base 76: mod_base = OTHER; note = 2'-O-methyl modified nucleotide
  modified_base 77: mod_base = OTHER; note = 2'-O-methyl modified nucleotide
  modified_base 78: mod_base = OTHER; note = 2'-O-methyl modified nucleotide
  modified_base 79: mod_base = OTHER; note = 2'-O-methyl modified nucleotide
  modified_base 80: mod_base = OTHER; note = 2'-O-methyl modified nucleotide
  modified_base 81: mod_base = OTHER; note = 2'-O-methyl modified nucleotide
  modified_base 82: mod_base = OTHER; note = 2'-O-methyl modified nucleotide
  modified_base 83: mod_base = OTHER; note = 2'-O-methyl modified nucleotide
  modified_base 84: mod_base = OTHER; note = 2'-O-methyl modified nucleotide
  modified_base 85: mod_base = OTHER; note = 2'-O-methyl modified nucleotide
  modified_base 86: mod_base = OTHER; note = 2'-O-methyl modified nucleotide
  modified_base 87: mod_base = OTHER; note = 2'-O-methyl modified nucleotide
  modified_base 88: mod_base = OTHER; note = 2'-O-methyl modified nucleotide
  modified_base 89: mod_base = OTHER; note = 2'-O-methyl modified nucleotide
  modified_base 90: mod_base = OTHER; note = 2'-O-methyl modified nucleotide
  modified_base 91: mod_base = OTHER; note = 2'-O-methyl modified nucleotide
  modified_base 92: mod_base = OTHER; note = 2'-O-methyl modified nucleotide
  modified_base 93: mod_base = OTHER; note = 2'-O-methyl modified nucleotide
  modified_base 94: mod_base = OTHER; note = 2'-O-methyl modified nucleotide
  modified_base 95: mod_base = OTHER; note = 2'-O-methyl modified nucleotide
  modified_base 96: mod_base = OTHER; note = 2'-O-methyl modified nucleotide
  modified_base 115: mod_base = OTHER; note = Nucleotide with phosphorothioate linkage
  modified_base 116: mod_base = OTHER; note = 2'-O-methyl modified nucleotide with phosphorothioate linkage
  modified_base 117: mod_base = OTHER; note = 2'-O-methyl modified nucleotide with phosphorothioate linkage
  modified_base 118: mod_base = OTHER; note = 2'-O-methyl modified nucleotide
actcacgctggatagcctccgttttagagctagaaatagcaagttaaaataaggctagtccgttatcaacttgaaaaagtggcaccgagtcggtgcgcctggatgatgggctatccag

SEQ ID NO: 17611 - RNA, 117 nt, synthetic construct
  source 1..117: mol_type = other RNA
  modified_base 1: mod_base = OTHER; note = 2'-O-methyl modified nucleotide with phosphorothioate linkage
  modified_base 2: mod_base = OTHER; note = 2'-O-methyl modified nucleotide with phosphorothioate linkage
  modified_base 3: mod_base = OTHER; note = 2'-O-methyl modified nucleotide with phosphorothioate linkage
  modified_base 29: mod_base = OTHER; note = 2'-O-methyl modified nucleotide
  modified_base 30: mod_base = OTHER; note = 2'-O-methyl modified nucleotide
  modified_base 31: mod_base = OTHER; note = 2'-O-methyl modified nucleotide
  modified_base 32: mod_base = OTHER; note = 2'-O-methyl modified nucleotide
  modified_base 33: mod_base = OTHER; note = 2'-O-methyl modified nucleotide
  modified_base 34: mod_base = OTHER; note = 2'-O-methyl modified nucleotide
  modified_base 35: mod_base = OTHER; note = 2'-O-methyl modified nucleotide
  modified_base 36: mod_base = OTHER; note = 2'-O-methyl modified nucleotide
  modified_base 37: mod_base = OTHER; note = 2'-O-methyl modified nucleotide
  modified_base 38: mod_base = OTHER; note = 2'-O-methyl modified nucleotide
  modified_base 39: mod_base = OTHER; note = 2'-O-methyl modified nucleotide
  modified_base 40: mod_base = OTHER; note = 2'-O-methyl modified nucleotide
  modified_base 69: mod_base = OTHER; note = 2'-O-methyl modified nucleotide
  modified_base 70: mod_base = OTHER; note = 2'-O-methyl modified nucleotide
  modified_base 71: mod_base = OTHER; note = 2'-O-methyl modified nucleotide
  modified_base 72: mod_base = OTHER; note = 2'-O-methyl modified nucleotide
  modified_base 73: mod_base = OTHER; note = 2'-O-methyl modified nucleotide
  modified_base 74: mod_base = OTHER; note = 2'-O-methyl modified nucleotide
  modified_base 75: mod_base = OTHER; note = 2'-O-methyl modified nucleotide
  modified_base 76: mod_base = OTHER; note = 2'-O-methyl modified nucleotide
  modified_base 77: mod_base = OTHER; note = 2'-O-methyl modified nucleotide
  modified_base 78: mod_base = OTHER; note = 2'-O-methyl modified nucleotide
  modified_base 79: mod_base = OTHER; note = 2'-O-methyl modified nucleotide
  modified_base 80: mod_base = OTHER; note = 2'-O-methyl modified nucleotide
  modified_base 81: mod_base = OTHER; note = 2'-O-methyl modified nucleotide
  modified_base 82: mod_base = OTHER; note = 2'-O-methyl modified nucleotide
  modified_base 83: mod_base = OTHER; note = 2'-O-methyl modified nucleotide
  modified_base 84: mod_base = OTHER; note = 2'-O-methyl modified nucleotide
  modified_base 85: mod_base = OTHER; note = 2'-O-methyl modified nucleotide
  modified_base 86: mod_base = OTHER; note = 2'-O-methyl modified nucleotide
  modified_base 87: mod_base = OTHER; note = 2'-O-methyl modified nucleotide
  modified_base 88: mod_base = OTHER; note = 2'-O-methyl modified nucleotide
  modified_base 89: mod_base = OTHER; note = 2'-O-methyl modified nucleotide
  modified_base 90: mod_base = OTHER; note = 2'-O-methyl modified nucleotide
  modified_base 91: mod_base = OTHER; note = 2'-O-methyl modified nucleotide
  modified_base 92: mod_base = OTHER; note = 2'-O-methyl modified nucleotide
  modified_base 93: mod_base = OTHER; note = 2'-O-methyl modified nucleotide
  modified_base 94: mod_base = OTHER; note = 2'-O-methyl modified nucleotide
  modified_base 95: mod_base = OTHER; note = 2'-O-methyl modified nucleotide
  modified_base 96: mod_base = OTHER; note = 2'-O-methyl modified nucleotide
  modified_base 114: mod_base = OTHER; note = Nucleotide with phosphorothioate linkage
  modified_base 115: mod_base = OTHER; note = 2'-O-methyl modified nucleotide with phosphorothioate linkage
  modified_base 116: mod_base = OTHER; note = 2'-O-methyl modified nucleotide with phosphorothioate linkage
  modified_base 117: mod_base = OTHER; note = 2'-O-methyl modified nucleotide
actcacgctggatagcctccgttttagagctagaaatagcaagttaaaataaggctagtccgttatcaacttgaaaaagtggcaccgagtcggtgcgcctggatgatgggctatcca

SEQ ID NO: 17612 - RNA, 116 nt, synthetic construct
  source 1..116: mol_type = other RNA
  modified_base 1: mod_base = OTHER; note = 2'-O-methyl modified nucleotide with phosphorothioate linkage
  modified_base 2: mod_base = OTHER; note = 2'-O-methyl modified nucleotide with phosphorothioate linkage
  modified_base 3: mod_base = OTHER; note = 2'-O-methyl modified nucleotide with phosphorothioate linkage
  modified_base 29: mod_base = OTHER; note = 2'-O-methyl modified nucleotide
  modified_base 30: mod_base = OTHER; note = 2'-O-methyl modified nucleotide
  modified_base 31: mod_base = OTHER; note = 2'-O-methyl modified nucleotide
  modified_base 32: mod_base = OTHER; note = 2'-O-methyl modified nucleotide
  modified_base 33: mod_base = OTHER; note = 2'-O-methyl modified nucleotide
  modified_base 34: mod_base = OTHER; note = 2'-O-methyl modified nucleotide
  modified_base 35: mod_base = OTHER; note = 2'-O-methyl modified nucleotide
  modified_base 36: mod_base = OTHER; note = 2'-O-methyl modified nucleotide
  modified_base 37: mod_base = OTHER; note = 2'-O-methyl modified nucleotide
  modified_base 38: mod_base = OTHER; note = 2'-O-methyl modified nucleotide
  modified_base 39: mod_base = OTHER; note = 2'-O-methyl modified nucleotide
  modified_base 40: mod_base = OTHER; note = 2'-O-methyl modified nucleotide
  modified_base 69: mod_base = OTHER; note = 2'-O-methyl modified nucleotide
  modified_base 70: mod_base = OTHER; note = 2'-O-methyl modified nucleotide
  modified_base 71: mod_base = OTHER; note = 2'-O-methyl modified nucleotide
  modified_base 72: mod_base = OTHER; note = 2'-O-methyl modified nucleotide
  modified_base 73: mod_base = OTHER; note = 2'-O-methyl modified nucleotide
  modified_base 74: mod_base = OTHER; note = 2'-O-methyl modified nucleotide
  modified_base 75: mod_base = OTHER; note = 2'-O-methyl modified nucleotide
  modified_base 76: mod_base = OTHER; note = 2'-O-methyl modified nucleotide
  modified_base 77: mod_base = OTHER; note = 2'-O-methyl modified nucleotide
  modified_base 78: mod_base = OTHER; note = 2'-O-methyl modified nucleotide
  modified_base 79: mod_base = OTHER; note = 2'-O-methyl modified nucleotide
  modified_base 80: mod_base = OTHER; note = 2'-O-methyl modified nucleotide
  modified_base 81: mod_base = OTHER; note = 2'-O-methyl modified nucleotide
  modified_base 82: mod_base = OTHER; note = 2'-O-methyl modified nucleotide
  modified_base 83: mod_base = OTHER; note = 2'-O-methyl modified nucleotide
  modified_base 84: mod_base = OTHER; note = 2'-O-methyl modified nucleotide
  modified_base 85: mod_base = OTHER; note = 2'-O-methyl modified nucleotide
  modified_base 86: mod_base = OTHER; note = 2'-O-methyl modified nucleotide
  modified_base 87: mod_base = OTHER; note = 2'-O-methyl modified nucleotide
  modified_base 88: mod_base = OTHER; note = 2'-O-methyl modified nucleotide
  modified_base 89: mod_base = OTHER; note = 2'-O-methyl modified nucleotide
  modified_base 90: mod_base = OTHER; note = 2'-O-methyl modified nucleotide
  modified_base 91: mod_base = OTHER; note = 2'-O-methyl modified nucleotide
  modified_base 92: mod_base = OTHER; note = 2'-O-methyl modified nucleotide
  modified_base 93: mod_base = OTHER; note = 2'-O-methyl modified nucleotide
  modified_base 94: mod_base = OTHER; note = 2'-O-methyl modified nucleotide
  modified_base 95: mod_base = OTHER; note = 2'-O-methyl modified nucleotide
  modified_base 96: mod_base = OTHER; note = 2'-O-methyl modified nucleotide
  modified_base 113: mod_base = OTHER; note = Nucleotide with phosphorothioate linkage
  modified_base 114: mod_base = OTHER; note = 2'-O-methyl modified nucleotide with phosphorothioate linkage
  modified_base 115: mod_base = OTHER; note = 2'-O-methyl modified nucleotide with phosphorothioate linkage
  modified_base 116: mod_base = OTHER; note = 2'-O-methyl modified nucleotide
actcacgctggatagcctccgttttagagctagaaatagcaagttaaaataaggctagtccgttatcaacttgaaaaagtggcaccgagtcggtgcgcctggatgatgggctatcc

SEQ ID NO: 17613 - RNA, 123 nt, synthetic construct
  source 1..123: mol_type = other RNA
  modified_base 1: mod_base = OTHER; note = 2'-O-methyl modified nucleotide with phosphorothioate linkage
  modified_base 2: mod_base = OTHER; note = 2'-O-methyl modified nucleotide with phosphorothioate linkage
  modified_base 3: mod_base = OTHER; note = 2'-O-methyl modified nucleotide with phosphorothioate linkage
  modified_base 29: mod_base = OTHER; note = 2'-O-methyl modified nucleotide
  modified_base 30: mod_base = OTHER; note = 2'-O-methyl modified nucleotide
  modified_base 31: mod_base = OTHER; note = 2'-O-methyl modified nucleotide
  modified_base 32: mod_base = OTHER; note = 2'-O-methyl modified nucleotide
  modified_base 33: mod_base = OTHER; note = 2'-O-methyl modified nucleotide
  modified_base 34: mod_base = OTHER; note = 2'-O-methyl modified nucleotide
  modified_base 35: mod_base = OTHER; note = 2'-O-methyl modified nucleotide
  modified_base 36: mod_base = OTHER; note = 2'-O-methyl modified nucleotide
  modified_base 37: mod_base = OTHER; note = 2'-O-methyl modified nucleotide
  modified_base 38: mod_base = OTHER; note = 2'-O-methyl modified nucleotide
  modified_base 39: mod_base = OTHER; note = 2'-O-methyl modified nucleotide
  modified_base 40: mod_base = OTHER; note = 2'-O-methyl modified nucleotide
  modified_base 69: mod_base = OTHER; note = 2'-O-methyl modified nucleotide
  modified_base 70: mod_base = OTHER; note = 2'-O-methyl modified nucleotide
  modified_base 71: mod_base = OTHER; note = 2'-O-methyl modified nucleotide
  modified_base 72: mod_base = OTHER; note = 2'-O-methyl modified nucleotide
  modified_base 73: mod_base = OTHER; note = 2'-O-methyl modified nucleotide
  modified_base 74: mod_base = OTHER; note = 2'-O-methyl modified nucleotide
  modified_base 75: mod_base = OTHER; note = 2'-O-methyl modified nucleotide
  modified_base 76: mod_base = OTHER; note = 2'-O-methyl modified nucleotide
  modified_base 77: mod_base = OTHER; note = 2'-O-methyl modified nucleotide
  modified_base 78: mod_base = OTHER; note = 2'-O-methyl modified nucleotide
  modified_base 79: mod_base = OTHER; note = 2'-O-methyl modified nucleotide
  modified_base 80: mod_base = OTHER; note = 2'-O-methyl modified nucleotide
  modified_base 81: mod_base = OTHER; note = 2'-O-methyl modified nucleotide
  modified_base 82: mod_base = OTHER; note = 2'-O-methyl modified nucleotide
  modified_base 83: mod_base = OTHER; note = 2'-O-methyl modified nucleotide
  modified_base 84: mod_base = OTHER; note = 2'-O-methyl modified nucleotide
  modified_base 85: mod_base = OTHER; note = 2'-O-methyl modified nucleotide
  modified_base 86: mod_base = OTHER; note = 2'-O-methyl modified nucleotide
  modified_base 87: mod_base = OTHER; note = 2'-O-methyl modified nucleotide
  modified_base 88: mod_base = OTHER; note = 2'-O-methyl modified nucleotide
  modified_base 89: mod_base = OTHER; note = 2'-O-methyl modified nucleotide
  modified_base 90: mod_base = OTHER; note = 2'-O-methyl modified nucleotide
  modified_base 91: mod_base = OTHER; note = 2'-O-methyl modified nucleotide
  modified_base 92: mod_base = OTHER; note = 2'-O-methyl modified nucleotide
  modified_base 93: mod_base = OTHER; note = 2'-O-methyl modified nucleotide
  modified_base 94: mod_base = OTHER; note = 2'-O-methyl modified nucleotide
  modified_base 95: mod_base = OTHER; note = 2'-O-methyl modified nucleotide
  modified_base 96: mod_base = OTHER; note = 2'-O-methyl modified nucleotide
  modified_base 120: mod_base = OTHER; note = Nucleotide with phosphorothioate linkage
  modified_base 121: mod_base = OTHER; note = 2'-O-methyl modified nucleotide with phosphorothioate linkage
  modified_base 122: mod_base = OTHER; note = 2'-O-methyl modified nucleotide with phosphorothioate linkage
  modified_base 123: mod_base = OTHER; note = 2'-O-methyl modified nucleotide
actcacgctggatagcctccgttttagagctagaaatagcaagttaaaataaggctagtccgttatcaacttgaaaaagtggcaccgagtcggtgctggcctggatgatgggctatccagcgt

SEQ ID NO: 17614 - RNA, 122 nt, synthetic construct
  source 1..122: mol_type = other RNA
  modified_base 1: mod_base = OTHER; note = 2'-O-methyl modified nucleotide with phosphorothioate linkage
  modified_base 2: mod_base = OTHER; note = 2'-O-methyl modified nucleotide with phosphorothioate linkage
  modified_base 3: mod_base = OTHER; note = 2'-O-methyl modified nucleotide with phosphorothioate linkage
  modified_base 29: mod_base = OTHER; note = 2'-O-methyl modified nucleotide
  modified_base 30: mod_base = OTHER; note = 2'-O-methyl modified nucleotide
  modified_base 31: mod_base = OTHER; note = 2'-O-methyl modified nucleotide
  modified_base 32: mod_base = OTHER; note = 2'-O-methyl modified nucleotide
  modified_base 33: mod_base = OTHER; note = 2'-O-methyl modified nucleotide
  modified_base 34: mod_base = OTHER; note = 2'-O-methyl modified nucleotide
  modified_base 35: mod_base = OTHER; note = 2'-O-methyl modified nucleotide
  modified_base 36: mod_base = OTHER; note = 2'-O-methyl modified nucleotide
  modified_base 37: mod_base = OTHER; note = 2'-O-methyl modified nucleotide
  modified_base 38: mod_base = OTHER; note = 2'-O-methyl modified nucleotide
  modified_base 39: mod_base = OTHER; note = 2'-O-methyl modified nucleotide
  modified_base 40: mod_base = OTHER; note = 2'-O-methyl modified nucleotide
  modified_base 69: mod_base = OTHER; note = 2'-O-methyl modified nucleotide
  modified_base 70: mod_base = OTHER; note = 2'-O-methyl modified nucleotide
  modified_base 71: mod_base = OTHER; note = 2'-O-methyl modified nucleotide
  modified_base 72: mod_base = OTHER; note = 2'-O-methyl modified nucleotide
  modified_base 73: mod_base = OTHER; note = 2'-O-methyl modified nucleotide
  modified_base 74: mod_base = OTHER; note = 2'-O-methyl modified nucleotide
  modified_base 75: mod_base = OTHER; note = 2'-O-methyl modified nucleotide
  modified_base 76: mod_base = OTHER; note = 2'-O-methyl modified nucleotide
  modified_base 77: mod_base = OTHER; note = 2'-O-methyl modified nucleotide
  modified_base 78: mod_base = OTHER; note = 2'-O-methyl modified nucleotide
  modified_base 79: mod_base = OTHER; note = 2'-O-methyl modified nucleotide
  modified_base 80: mod_base = OTHER; note = 2'-O-methyl modified nucleotide
  modified_base 81: mod_base = OTHER; note = 2'-O-methyl modified nucleotide
  modified_base 82: mod_base = OTHER; note = 2'-O-methyl modified nucleotide
  modified_base 83: mod_base = OTHER; note = 2'-O-methyl modified nucleotide
  modified_base 84: mod_base = OTHER; note = 2'-O-methyl modified nucleotide
  modified_base 85: mod_base = OTHER; note = 2'-O-methyl modified nucleotide
  modified_base 86: mod_base = OTHER; note = 2'-O-methyl modified nucleotide
  modified_base 87: mod_base = OTHER; note = 2'-O-methyl modified nucleotide
  modified_base 88: mod_base = OTHER; note = 2'-O-methyl modified nucleotide
  modified_base 89: mod_base = OTHER; note = 2'-O-methyl modified nucleotide
  modified_base 90: mod_base = OTHER; note = 2'-O-methyl modified nucleotide
  modified_base 91: mod_base = OTHER; note = 2'-O-methyl modified nucleotide
  modified_base 92: mod_base = OTHER; note = 2'-O-methyl modified nucleotide
  modified_base 93: mod_base = OTHER; note = 2'-O-methyl modified nucleotide
  modified_base 94: mod_base = OTHER; note = 2'-O-methyl modified nucleotide
  modified_base 95: mod_base = OTHER; note = 2'-O-methyl modified nucleotide
  modified_base 96: mod_base = OTHER; note = 2'-O-methyl modified nucleotide
  modified_base 119: mod_base = OTHER; note = Nucleotide with phosphorothioate linkage
  modified_base 120: mod_base = OTHER; note = 2'-O-methyl modified nucleotide with phosphorothioate linkage
  modified_base 121: mod_base = OTHER; note = 2'-O-methyl modified nucleotide with phosphorothioate linkage
  modified_base 122: mod_base = OTHER; note = 2'-O-methyl modified nucleotide
actcacgctggatagcctccgttttagagctagaaatagcaagttaaaataaggctagtccgttatcaacttgaaaaagtggcaccgagtcggtgctggcctggatgatgggctatccagcg

SEQ ID NO: 17615 - RNA, 121 nt, synthetic construct
  source 1..121: mol_type = other RNA
  modified_base 1: mod_base = OTHER; note = 2'-O-methyl modified nucleotide with phosphorothioate linkage
  modified_base 2: mod_base = OTHER; note = 2'-O-methyl modified nucleotide with phosphorothioate linkage
  modified_base 3: mod_base = OTHER; note = 2'-O-methyl modified nucleotide with phosphorothioate linkage
  modified_base 29: mod_base = OTHER; note = 2'-O-methyl modified nucleotide
  modified_base 30: mod_base = OTHER; note = 2'-O-methyl modified nucleotide
  modified_base 31: mod_base = OTHER; note = 2'-O-methyl modified nucleotide
  modified_base 32: mod_base = OTHER; note = 2'-O-methyl modified nucleotide
  modified_base 33: mod_base = OTHER; note = 2'-O-methyl modified nucleotide
  modified_base 34: mod_base = OTHER; note = 2'-O-methyl modified nucleotide
  modified_base 35: mod_base = OTHER; note = 2'-O-methyl modified nucleotide
  modified_base 36: mod_base = OTHER; note = 2'-O-methyl modified nucleotide
  modified_base 37: mod_base = OTHER; note = 2'-O-methyl modified nucleotide
  modified_base 38: mod_base = OTHER; note = 2'-O-methyl modified nucleotide
  modified_base 39: mod_base = OTHER; note = 2'-O-methyl modified nucleotide
  modified_base 40: mod_base = OTHER; note = 2'-O-methyl modified nucleotide
  modified_base 69: mod_base = OTHER; note = 2'-O-methyl modified nucleotide
  modified_base 70: mod_base = OTHER; note = 2'-O-methyl modified nucleotide
  modified_base 71: mod_base = OTHER; note = 2'-O-methyl modified nucleotide
  modified_base 72: mod_base = OTHER; note = 2'-O-methyl modified nucleotide
  modified_base 73: mod_base = OTHER; note = 2'-O-methyl modified nucleotide
  modified_base 74: mod_base = OTHER; note = 2'-O-methyl modified nucleotide
  modified_base 75: mod_base = OTHER; note = 2'-O-methyl modified nucleotide
  modified_base 76: mod_base = OTHER; note = 2'-O-methyl modified nucleotide
  modified_base 77: mod_base = OTHER; note = 2'-O-methyl modified nucleotide
  modified_base 78: mod_base = OTHER; note = 2'-O-methyl modified nucleotide
  modified_base 79: mod_base = OTHER; note = 2'-O-methyl modified nucleotide
  modified_base 80: mod_base = OTHER; note = 2'-O-methyl modified nucleotide
  modified_base 81: mod_base = OTHER; note = 2'-O-methyl modified nucleotide
  modified_base 82: mod_base = OTHER; note = 2'-O-methyl modified nucleotide
  modified_base 83: mod_base = OTHER; note = 2'-O-methyl modified nucleotide
  modified_base 84: mod_base = OTHER; note = 2'-O-methyl modified nucleotide
  modified_base 85: mod_base = OTHER; note = 2'-O-methyl modified nucleotide
  modified_base 86: mod_base = OTHER; note = 2'-O-methyl modified nucleotide
  modified_base 87: mod_base = OTHER; note = 2'-O-methyl modified nucleotide
  modified_base 88: mod_base = OTHER; note = 2'-O-methyl modified nucleotide
  modified_base 89: mod_base = OTHER; note = 2'-O-methyl modified nucleotide
  modified_base 90: mod_base = OTHER; note = 2'-O-methyl modified nucleotide
  modified_base 91: mod_base = OTHER; note = 2'-O-methyl modified nucleotide
  modified_base 92: mod_base = OTHER; note = 2'-O-methyl modified nucleotide
  modified_base 93: mod_base = OTHER; note = 2'-O-methyl modified nucleotide
  modified_base 94: mod_base = OTHER; note = 2'-O-methyl modified nucleotide
  modified_base 95: mod_base = OTHER; note = 2'-O-methyl modified nucleotide
  modified_base 96: mod_base = OTHER; note = 2'-O-methyl modified nucleotide
  modified_base 118: mod_base = OTHER; note = Nucleotide with phosphorothioate linkage
  modified_base 119: mod_base = OTHER; note = 2'-O-methyl modified nucleotide with phosphorothioate linkage
  modified_base 120: mod_base = OTHER; note = 2'-O-methyl modified nucleotide with phosphorothioate linkage
  modified_base 121: mod_base = OTHER; note = 2'-O-methyl modified nucleotide
actcacgctggatagcctccgttttagagctagaaatagcaagttaaaataaggctagtccgttatcaacttgaaaaagtggcaccgagtcggtgctggcctggatgatgggctatccagc

SEQ ID NO: 17616 - RNA, 120 nt, synthetic construct
  source 1..120: mol_type = other RNA
  modified_base 1: mod_base = OTHER; note = 2'-O-methyl modified nucleotide with phosphorothioate linkage
  modified_base 2: mod_base = OTHER; note = 2'-O-methyl modified nucleotide with phosphorothioate linkage
  modified_base 3: mod_base = OTHER; note = 2'-O-methyl modified nucleotide with phosphorothioate linkage
  modified_base 29: mod_base = OTHER; note = 2'-O-methyl modified nucleotide
  modified_base 30: mod_base = OTHER; note = 2'-O-methyl modified nucleotide
  modified_base 31: mod_base = OTHER; note = 2'-O-methyl modified nucleotide
  modified_base 32: mod_base = OTHER; note = 2'-O-methyl modified nucleotide
  modified_base 33: mod_base = OTHER; note = 2'-O-methyl modified nucleotide
  modified_base 34: mod_base = OTHER; note = 2'-O-methyl modified nucleotide
  modified_base 35: mod_base = OTHER; note = 2'-O-methyl modified nucleotide
  modified_base 36: mod_base = OTHER; note = 2'-O-methyl modified nucleotide
  modified_base 37: mod_base = OTHER; note = 2'-O-methyl modified nucleotide
  modified_base 38: mod_base = OTHER; note = 2'-O-methyl modified nucleotide
  modified_base 39: mod_base = OTHER; note = 2'-O-methyl modified nucleotide
  modified_base 40: mod_base = OTHER; note = 2'-O-methyl modified nucleotide
  modified_base 69: mod_base = OTHER; note = 2'-O-methyl modified nucleotide
  modified_base 70: mod_base = OTHER; note = 2'-O-methyl modified nucleotide
  modified_base 71: mod_base = OTHER; note = 2'-O-methyl modified nucleotide
  modified_base 72: mod_base = OTHER; note = 2'-O-methyl modified nucleotide
  modified_base 73: mod_base = OTHER; note = 2'-O-methyl modified nucleotide
  modified_base 74: mod_base = OTHER; note = 2'-O-methyl modified nucleotide
  modified_base 75: mod_base = OTHER; note = 2'-O-methyl modified nucleotide
  modified_base 76: mod_base = OTHER; note = 2'-O-methyl modified nucleotide
  modified_base 77: mod_base = OTHER; note = 2'-O-methyl modified nucleotide
  modified_base 78: mod_base = OTHER; note = 2'-O-methyl modified nucleotide
  modified_base 79: mod_base = OTHER; note = 2'-O-methyl modified nucleotide
  modified_base 80: mod_base = OTHER; note = 2'-O-methyl modified nucleotide
  modified_base 81: mod_base = OTHER; note = 2'-O-methyl modified nucleotide
  modified_base 82: mod_base = OTHER; note = 2'-O-methyl modified nucleotide
  modified_base 83: mod_base = OTHER; note = 2'-O-methyl modified nucleotide
  modified_base 84: mod_base = OTHER; note = 2'-O-methyl modified nucleotide
  modified_base 85: mod_base = OTHER; note = 2'-O-methyl modified nucleotide
  modified_base 86: mod_base = OTHER; note = 2'-O-methyl modified nucleotide
  modified_base 87: mod_base = OTHER; note = 2'-O-methyl modified nucleotide
  modified_base 88: mod_base = OTHER; note = 2'-O-methyl modified nucleotide
  modified_base 89: mod_base = OTHER; note = 2'-O-methyl modified nucleotide
  modified_base 90: mod_base = OTHER; note = 2'-O-methyl modified nucleotide
  modified_base 91: mod_base = OTHER; note = 2'-O-methyl modified nucleotide
  modified_base 92: mod_base = OTHER; note = 2'-O-methyl modified nucleotide
  modified_base 93: mod_base = OTHER; note = 2'-O-methyl modified nucleotide
  modified_base 94: mod_base = OTHER; note = 2'-O-methyl modified nucleotide
  modified_base 95: mod_base = OTHER; note = 2'-O-methyl modified nucleotide
  modified_base 96: mod_base = OTHER; note = 2'-O-methyl modified nucleotide
  modified_base 117: mod_base = OTHER; note = Nucleotide with phosphorothioate linkage
  modified_base 118: mod_base = OTHER; note = 2'-O-methyl modified nucleotide with phosphorothioate linkage
  modified_base 119: mod_base = OTHER; note = 2'-O-methyl modified nucleotide with phosphorothioate linkage
  modified_base 120: mod_base = OTHER; note = 2'-O-methyl modified nucleotide
actcacgctggatagcctccgttttagagctagaaatagcaagttaaaataaggctagtccgttatcaacttgaaaaagtggcaccgagtcggtgctggcctggatgatgggctatccag

SEQ ID NO: 17617 - RNA, 119 nt, synthetic construct
  source 1..119: mol_type = other RNA
  modified_base 1: mod_base = OTHER; note = 2'-O-methyl modified nucleotide with phosphorothioate linkage
  modified_base 2: mod_base = OTHER; note = 2'-O-methyl modified nucleotide with phosphorothioate linkage
  modified_base 3: mod_base = OTHER; note = 2'-O-methyl modified nucleotide with phosphorothioate linkage
  modified_base 29: mod_base = OTHER; note = 2'-O-methyl modified nucleotide
  modified_base 30: mod_base = OTHER; note = 2'-O-methyl modified nucleotide
  modified_base 31: mod_base = OTHER; note = 2'-O-methyl modified nucleotide
  modified_base 32: mod_base = OTHER; note = 2'-O-methyl modified nucleotide
  modified_base 33: mod_base = OTHER; note = 2'-O-methyl modified nucleotide
  modified_base 34: mod_base = OTHER; note = 2'-O-methyl modified nucleotide
  modified_base 35: mod_base = OTHER; note = 2'-O-methyl modified nucleotide
  modified_base 36: mod_base = OTHER; note = 2'-O-methyl modified nucleotide
  modified_base 37: mod_base = OTHER; note = 2'-O-methyl modified nucleotide
  modified_base 38: mod_base = OTHER; note = 2'-O-methyl modified nucleotide
  modified_base 39: mod_base = OTHER; note = 2'-O-methyl modified nucleotide
  modified_base 40: mod_base = OTHER; note = 2'-O-methyl modified nucleotide
  modified_base 69: mod_base = OTHER; note = 2'-O-methyl modified nucleotide
  modified_base 70: mod_base = OTHER; note = 2'-O-methyl modified nucleotide
  modified_base 71: mod_base = OTHER; note = 2'-O-methyl modified nucleotide
  modified_base 72: mod_base = OTHER; note = 2'-O-methyl modified nucleotide
  modified_base 73: mod_base = OTHER; note = 2'-O-methyl modified nucleotide
  modified_base 74: mod_base = OTHER; note = 2'-O-methyl modified nucleotide
  modified_base 75: mod_base = OTHER; note = 2'-O-methyl modified nucleotide
  modified_base 76: mod_base = OTHER; note = 2'-O-methyl modified nucleotide
  modified_base 77: mod_base = OTHER; note = 2'-O-methyl modified nucleotide
  modified_base 78: mod_base = OTHER; note = 2'-O-methyl modified nucleotide
  modified_base 79: mod_base = OTHER; note = 2'-O-methyl modified nucleotide
  modified_base 80: mod_base = OTHER; note = 2'-O-methyl modified nucleotide
  modified_base 81: mod_base = OTHER; note = 2'-O-methyl modified nucleotide
  modified_base 82: mod_base = OTHER; note = 2'-O-methyl modified nucleotide
  modified_base 83: mod_base = OTHER; note = 2'-O-methyl modified nucleotide
  modified_base 84: mod_base = OTHER; note = 2'-O-methyl modified nucleotide
  modified_base 85: mod_base = OTHER; note = 2'-O-methyl modified nucleotide
  modified_base 86: mod_base = OTHER; note = 2'-O-methyl modified nucleotide
  modified_base 87: mod_base = OTHER; note = 2'-O-methyl modified nucleotide
  modified_base 88: mod_base = OTHER; note = 2'-O-methyl modified nucleotide
  modified_base 89: mod_base = OTHER; note = 2'-O-methyl modified nucleotide
  modified_base 90: mod_base = OTHER; note = 2'-O-methyl modified nucleotide
  modified_base 91: mod_base = OTHER; note = 2'-O-methyl modified nucleotide
  modified_base 92: mod_base = OTHER; note = 2'-O-methyl modified nucleotide
  modified_base 93: mod_base = OTHER; note = 2'-O-methyl modified nucleotide
  modified_base 94: mod_base = OTHER; note = 2'-O-methyl modified nucleotide
  modified_base 95: mod_base = OTHER; note = 2'-O-methyl modified nucleotide
  modified_base 96: mod_base = OTHER; note = 2'-O-methyl modified nucleotide
  modified_base 116: mod_base = OTHER; note = Nucleotide with phosphorothioate linkage
  modified_base 117: mod_base = OTHER; note = 2'-O-methyl modified nucleotide with phosphorothioate linkage
  modified_base 118: mod_base = OTHER; note = 2'-O-methyl modified nucleotide with phosphorothioate linkage
  modified_base 119: mod_base = OTHER; note = 2'-O-methyl modified nucleotide
actcacgctggatagcctccgttttagagctagaaatagcaagttaaaataaggctagtccgttatcaacttgaaaaagtggcaccgagtcggtgctggcctggatgatgggctatcca

SEQ ID NO: 17618 - RNA, 118 nt, synthetic construct
  source 1..118: mol_type = other RNA
  modified_base 1: mod_base = OTHER; note = 2'-O-methyl modified nucleotide with phosphorothioate linkage
  modified_base 2: mod_base = OTHER; note = 2'-O-methyl modified nucleotide with phosphorothioate linkage
  modified_base 3: mod_base = OTHER; note = 2'-O-methyl modified nucleotide with phosphorothioate linkage
  modified_base 29: mod_base = OTHER; note = 2'-O-methyl modified nucleotide
  modified_base 30: mod_base = OTHER; note = 2'-O-methyl modified nucleotide
  modified_base 31: mod_base = OTHER; note = 2'-O-methyl modified nucleotide
  modified_base 32: mod_base = OTHER; note = 2'-O-methyl modified nucleotide
  modified_base 33: mod_base = OTHER; note = 2'-O-methyl modified nucleotide
  modified_base 34: mod_base = OTHER; note = 2'-O-methyl modified nucleotide
  modified_base 35: mod_base = OTHER; note = 2'-O-methyl modified nucleotide
  modified_base 36: mod_base = OTHER; note = 2'-O-methyl modified nucleotide
  modified_base 37: mod_base = OTHER; note = 2'-O-methyl modified nucleotide
  modified_base 38: mod_base = OTHER; note = 2'-O-methyl modified nucleotide
  modified_base 39: mod_base = OTHER; note = 2'-O-methyl modified nucleotide
  modified_base 40: mod_base = OTHER; note = 2'-O-methyl modified nucleotide
  modified_base 69: mod_base = OTHER; note = 2'-O-methyl modified nucleotide
  modified_base 70: mod_base = OTHER; note = 2'-O-methyl modified nucleotide
  modified_base 71: mod_base = OTHER; note = 2'-O-methyl modified nucleotide
  modified_base 72: mod_base = OTHER; note = 2'-O-methyl modified nucleotide
  modified_base 73: mod_base = OTHER; note = 2'-O-methyl modified nucleotide
  modified_base 74: mod_base = OTHER; note = 2'-O-methyl modified nucleotide
  modified_base 75: mod_base = OTHER; note = 2'-O-methyl modified nucleotide
  modified_base 76: mod_base = OTHER; note = 2'-O-methyl modified nucleotide
  modified_base 77: mod_base = OTHER; note = 2'-O-methyl modified nucleotide
  modified_base 78: mod_base = OTHER; note = 2'-O-methyl modified nucleotide
  modified_base 79: mod_base = OTHER; note = 2'-O-methyl modified nucleotide
  modified_base 80: mod_base = OTHER; note = 2'-O-methyl modified nucleotide
  modified_base 81: mod_base = OTHER; note = 2'-O-methyl modified nucleotide
  modified_base 82: mod_base = OTHER; note = 2'-O-methyl modified nucleotide
  modified_base 83: mod_base = OTHER; note = 2'-O-methyl modified nucleotide
  modified_base 84: mod_base = OTHER; note = 2'-O-methyl modified nucleotide
  modified_base 85: mod_base = OTHER; note = 2'-O-methyl modified nucleotide
  modified_base 86: mod_base = OTHER; note = 2'-O-methyl modified nucleotide
  modified_base 87: mod_base = OTHER; note = 2'-O-methyl modified nucleotide
  modified_base 88: mod_base = OTHER; note = 2'-O-methyl modified nucleotide
  modified_base 89: mod_base = OTHER; note = 2'-O-methyl modified nucleotide
  modified_base 90: mod_base = OTHER; note = 2'-O-methyl modified nucleotide
  modified_base 91: mod_base = OTHER; note = 2'-O-methyl modified nucleotide
  modified_base 92: mod_base = OTHER; note = 2'-O-methyl modified nucleotide
  modified_base 93: mod_base = OTHER; note = 2'-O-methyl modified nucleotide
  modified_base 94: mod_base = OTHER; note = 2'-O-methyl modified nucleotide
  modified_base 95: mod_base = OTHER; note = 2'-O-methyl modified nucleotide
  modified_base 96: mod_base = OTHER; note = 2'-O-methyl modified nucleotide
  modified_base 115: mod_base = OTHER; note = Nucleotide with phosphorothioate linkage
  modified_base 116: mod_base = OTHER; note = 2'-O-methyl modified nucleotide with phosphorothioate linkage
  modified_base 117: mod_base = OTHER; note = 2'-O-methyl modified nucleotide with phosphorothioate linkage
  modified_base 118: mod_base = OTHER; note = 2'-O-methyl modified nucleotide
actcacgctggatagcctccgttttagagctagaaatagcaagttaaaataaggctagtccgttatcaacttgaaaaagtggcaccgagtcggtgctggcctggatgatgggctatcc

SEQ ID NO: 17619 - RNA, 125 nt, synthetic construct
  source 1..125: mol_type = other RNA
  modified_base 1: mod_base = OTHER; note = 2'-O-methyl modified nucleotide with phosphorothioate linkage
  modified_base 2: mod_base = OTHER; note = 2'-O-methyl modified nucleotide with phosphorothioate linkage
  modified_base 3: mod_base = OTHER; note = 2'-O-methyl modified nucleotide with phosphorothioate linkage
  modified_base 29: mod_base = OTHER; note = 2'-O-methyl modified nucleotide
  modified_base 30: mod_base = OTHER; note = 2'-O-methyl modified nucleotide
  modified_base 31: mod_base = OTHER; note = 2'-O-methyl modified nucleotide
  modified_base 32: mod_base = OTHER; note = 2'-O-methyl modified nucleotide
  modified_base 33: mod_base = OTHER; note = 2'-O-methyl modified nucleotide
  modified_base 34: mod_base = OTHER; note = 2'-O-methyl modified nucleotide
  modified_base 35: mod_base = OTHER; note = 2'-O-methyl modified nucleotide
  modified_base 36: mod_base = OTHER; note = 2'-O-methyl modified nucleotide
  modified_base 37: mod_base = OTHER; note = 2'-O-methyl modified nucleotide
  modified_base 38: mod_base = OTHER; note = 2'-O-methyl modified nucleotide
  modified_base 39: mod_base = OTHER; note = 2'-O-methyl modified nucleotide
  modified_base 40: mod_base = OTHER; note = 2'-O-methyl modified nucleotide
  modified_base 69: mod_base = OTHER; note = 2'-O-methyl modified nucleotide
  modified_base 70: mod_base = OTHER; note = 2'-O-methyl modified nucleotide
  modified_base 71: mod_base = OTHER; note = 2'-O-methyl modified nucleotide
  modified_base 72: mod_base = OTHER; note = 2'-O-methyl modified nucleotide
  modified_base 73: mod_base = OTHER; note = 2'-O-methyl modified nucleotide
  modified_base 74: mod_base = OTHER; note = 2'-O-methyl modified nucleotide
  modified_base 75: mod_base = OTHER; note = 2'-O-methyl modified nucleotide
  modified_base 76: mod_base = OTHER; note = 2'-O-methyl modified nucleotide
  modified_base 77: mod_base = OTHER; note = 2'-O-methyl modified nucleotide
  modified_base 78: mod_base = OTHER; note = 2'-O-methyl modified nucleotide
  modified_base 79: mod_base = OTHER; note = 2'-O-methyl modified nucleotide
  modified_base 80: mod_base = OTHER; note = 2'-O-methyl modified nucleotide
  modified_base 81: mod_base = OTHER; note = 2'-O-methyl modified nucleotide
  modified_base 82: mod_base = OTHER; note = 2'-O-methyl modified nucleotide
  modified_base 83: mod_base = OTHER; note = 2'-O-methyl modified nucleotide
  modified_base 84: mod_base = OTHER; note = 2'-O-methyl modified nucleotide
  modified_base 85: mod_base = OTHER; note = 2'-O-methyl modified nucleotide
  modified_base 86: mod_base = OTHER; note = 2'-O-methyl modified nucleotide
  modified_base 87: mod_base = OTHER; note = 2'-O-methyl modified nucleotide
  modified_base 88: mod_base = OTHER; note = 2'-O-methyl modified nucleotide
  modified_base 89: mod_base = OTHER; note = 2'-O-methyl modified nucleotide
  modified_base 90: mod_base = OTHER; note = 2'-O-methyl modified nucleotide
  modified_base 91: mod_base = OTHER; note = 2'-O-methyl modified nucleotide
  modified_base 92: mod_base = OTHER; note = 2'-O-methyl modified nucleotide
  modified_base 93: mod_base = OTHER; note = 2'-O-methyl modified nucleotide
  modified_base 94: mod_base = OTHER; note = 2'-O-methyl modified nucleotide
  modified_base 95: mod_base = OTHER; note = 2'-O-methyl modified nucleotide
  modified_base 96: mod_base = OTHER; note = 2'-O-methyl modified nucleotide
  modified_base 122: mod_base = OTHER; note = Nucleotide with phosphorothioate linkage
  modified_base 123: mod_base = OTHER; note = 2'-O-methyl modified nucleotide with phosphorothioate linkage
  modified_base 124: mod_base = OTHER; note = 2'-O-methyl modified nucleotide with phosphorothioate linkage
  modified_base 125: mod_base = OTHER; note = 2'-O-methyl modified nucleotide
actcacgctggatagcctccgttttagagctagaaatagcaagttaaaataaggctagtccgttatcaacttgaaaaagtggcaccgagtcggtgctctggcctggatgatgggctatccagcgt

SEQ ID NO: 17620 - RNA, 124 nt, synthetic construct
  source 1..124: mol_type = other RNA
  modified_base 1: mod_base = OTHER; note = 2'-O-methyl modified nucleotide with phosphorothioate linkage
  modified_base 2: mod_base = OTHER; note = 2'-O-methyl modified nucleotide with phosphorothioate linkage
  modified_base 3: mod_base = OTHER; note = 2'-O-methyl modified nucleotide with phosphorothioate linkage
  modified_base 29: mod_base = OTHER; note = 2'-O-methyl modified nucleotide
  modified_base 30: mod_base = OTHER; note = 2'-O-methyl modified nucleotide
  modified_base 31: mod_base = OTHER; note = 2'-O-methyl modified nucleotide
  modified_base 32: mod_base = OTHER; note = 2'-O-methyl modified nucleotide
  modified_base 33: mod_base = OTHER; note = 2'-O-methyl modified nucleotide
  modified_base 34: mod_base = OTHER; note = 2'-O-methyl modified nucleotide
  modified_base 35: mod_base = OTHER; note = 2'-O-methyl modified nucleotide
  modified_base 36: mod_base = OTHER; note = 2'-O-methyl modified nucleotide
  modified_base 37: mod_base = OTHER; note = 2'-O-methyl modified nucleotide
  modified_base 38: mod_base = OTHER; note = 2'-O-methyl modified nucleotide
  modified_base 39: mod_base = OTHER; note = 2'-O-methyl modified nucleotide
  modified_base 40: mod_base = OTHER; note = 2'-O-methyl modified nucleotide
  modified_base 69: mod_base = OTHER; note = 2'-O-methyl modified nucleotide
  modified_base 70: mod_base = OTHER; note = 2'-O-methyl modified nucleotide
  modified_base 71: mod_base = OTHER; note = 2'-O-methyl modified nucleotide
  modified_base 72: mod_base = OTHER; note = 2'-O-methyl modified nucleotide
  modified_base 73: mod_base = OTHER; note = 2'-O-methyl modified nucleotide
  modified_base 74: mod_base = OTHER; note = 2'-O-methyl modified nucleotide
  modified_base 75: mod_base = OTHER; note = 2'-O-methyl modified nucleotide
  modified_base 76: mod_base = OTHER; note = 2'-O-methyl modified nucleotide
  modified_base 77: mod_base = OTHER; note = 2'-O-methyl modified nucleotide
  modified_base 78: mod_base = OTHER; note = 2'-O-methyl modified nucleotide
  modified_base 79: mod_base = OTHER; note = 2'-O-methyl modified nucleotide
  modified_base 80: mod_base = OTHER; note = 2'-O-methyl modified nucleotide
  modified_base 81: mod_base = OTHER; note = 2'-O-methyl modified nucleotide
  modified_base 82: mod_base = OTHER; note = 2'-O-methyl modified nucleotide
  modified_base 83: mod_base = OTHER; note = 2'-O-methyl modified nucleotide
  modified_base 84: mod_base = OTHER; note = 2'-O-methyl modified nucleotide
  modified_base 85: mod_base = OTHER; note = 2'-O-methyl modified nucleotide
  modified_base 86: mod_base = OTHER; note = 2'-O-methyl modified nucleotide
  modified_base 87: mod_base = OTHER; note = 2'-O-methyl modified nucleotide
  modified_base 88: mod_base = OTHER; note = 2'-O-methyl modified nucleotide
  modified_base 89: mod_base = OTHER; note = 2'-O-methyl modified nucleotide
  modified_base 90: mod_base = OTHER; note = 2'-O-methyl modified nucleotide
  modified_base 91: mod_base = OTHER; note = 2'-O-methyl modified nucleotide
  modified_base 92: mod_base = OTHER; note = 2'-O-methyl modified nucleotide
  modified_base 93: mod_base = OTHER; note = 2'-O-methyl modified nucleotide
  modified_base 94: mod_base = OTHER; note = 2'-O-methyl modified nucleotide
  modified_base 95: mod_base = OTHER; note = 2'-O-methyl modified nucleotide
  modified_base 96: mod_base = OTHER; note = 2'-O-methyl modified nucleotide
  modified_base 121: mod_base = OTHER; note = Nucleotide with phosphorothioate linkage
  modified_base 122: mod_base = OTHER; note = 2'-O-methyl modified nucleotide with phosphorothioate linkage
  modified_base 123: mod_base = OTHER; note = 2'-O-methyl modified nucleotide with phosphorothioate linkage
  modified_base 124: mod_base = OTHER; note = 2'-O-methyl modified nucleotide
actcacgctggatagcctccgttttagagctagaaatagcaagttaaaataaggctagtccgttatcaacttgaaaaagtggcaccgagtcggtgctctggcctggatgatgggctatccagcg

SEQ ID NO: 17621 - RNA, 123 nt, synthetic construct
  source 1..123: mol_type = other RNA
  modified_base 1: mod_base = OTHER; note = 2'-O-methyl modified nucleotide with phosphorothioate linkage
  modified_base 2: mod_base = OTHER; note = 2'-O-methyl modified nucleotide with phosphorothioate linkage
  modified_base 3: mod_base = OTHER; note = 2'-O-methyl modified nucleotide with phosphorothioate linkage
  modified_base 29: mod_base = OTHER; note = 2'-O-methyl modified nucleotide
  modified_base 30: mod_base = OTHER; note = 2'-O-methyl modified nucleotide
  modified_base 31: mod_base = OTHER; note = 2'-O-methyl modified nucleotide
  modified_base 32: mod_base = OTHER; note = 2'-O-methyl modified nucleotide
  modified_base 33: mod_base = OTHER; note = 2'-O-methyl modified nucleotide
  modified_base 34: mod_base = OTHER; note = 2'-O-methyl modified nucleotide
  modified_base 35: mod_base = OTHER; note = 2'-O-methyl modified nucleotide
  modified_base 36: mod_base = OTHER; note = 2'-O-methyl modified nucleotide
  modified_base 37: mod_base = OTHER; note = 2'-O-methyl modified nucleotide
  modified_base 38: mod_base = OTHER; note = 2'-O-methyl modified nucleotide
  modified_base 39: mod_base = OTHER; note = 2'-O-methyl modified nucleotide
  modified_base 40: mod_base = OTHER; note = 2'-O-methyl modified nucleotide
  modified_base 69: mod_base = OTHER; note = 2'-O-methyl modified nucleotide
  modified_base 70: mod_base = OTHER; note = 2'-O-methyl modified nucleotide
  modified_base 71: mod_base = OTHER; note = 2'-O-methyl modified nucleotide
  modified_base 72: mod_base = OTHER; note = 2'-O-methyl modified nucleotide
  modified_base 73: mod_base = OTHER; note = 2'-O-methyl modified nucleotide
  modified_base 74: mod_base = OTHER; note = 2'-O-methyl modified nucleotide
  modified_base 75: mod_base = OTHER; note = 2'-O-methyl modified nucleotide
  modified_base 76: mod_base = OTHER; note = 2'-O-methyl modified nucleotide
  modified_base 77: mod_base = OTHER; note = 2'-O-methyl modified nucleotide
  modified_base 78: mod_base = OTHER; note = 2'-O-methyl modified nucleotide
  modified_base 79: mod_base = OTHER; note = 2'-O-methyl modified nucleotide
  modified_base 80: mod_base = OTHER; note = 2'-O-methyl modified nucleotide
  modified_base 81: mod_base = OTHER; note = 2'-O-methyl modified nucleotide
  modified_base 82: mod_base = OTHER; note = 2'-O-methyl modified nucleotide
  modified_base 83: mod_base = OTHER; note = 2'-O-methyl modified nucleotide
  modified_base 84: mod_base = OTHER; note = 2'-O-methyl modified nucleotide
  modified_base 85: mod_base = OTHER; note = 2'-O-methyl modified nucleotide
  modified_base 86: mod_base = OTHER; note = 2'-O-methyl modified nucleotide
  modified_base 87: mod_base = OTHER; note = 2'-O-methyl modified nucleotide
  modified_base 88: mod_base = OTHER; note = 2'-O-methyl modified nucleotide
  modified_base 89: mod_base = OTHER; note = 2'-O-methyl modified nucleotide
  modified_base 90: mod_base = OTHER; note = 2'-O-methyl modified nucleotide
  modified_base 91: mod_base = OTHER; note = 2'-O-methyl modified nucleotide
  modified_base 92: mod_base = OTHER; note = 2'-O-methyl modified nucleotide
  modified_base 93: mod_base = OTHER; note = 2'-O-methyl modified nucleotide
  modified_base 94: mod_base = OTHER; note = 2'-O-methyl modified nucleotide
  modified_base 95: mod_base = OTHER; note = 2'-O-methyl modified nucleotide
  modified_base 96: mod_base = OTHER; note = 2'-O-methyl modified nucleotide
  modified_base 120: mod_base = OTHER; note = Nucleotide with phosphorothioate linkage
  modified_base 121: mod_base = OTHER; note = 2'-O-methyl modified nucleotide with phosphorothioate linkage
  modified_base 122: mod_base = OTHER; note = 2'-O-methyl modified nucleotide with phosphorothioate linkage
  modified_base 123: mod_base = OTHER; note = 2'-O-methyl modified nucleotide
actcacgctggatagcctccgttttagagctagaaatagcaagttaaaataaggctagtccgttatcaacttgaaaaagtggcaccgagtcggtgctctggcctggatgatgggctatccagc

SEQ ID NO: 17622 - RNA, 122 nt, synthetic construct
  source 1..122: mol_type = other RNA
  modified_base 1: mod_base = OTHER; note = 2'-O-methyl modified nucleotide with phosphorothioate linkage
  modified_base 2: mod_base = OTHER; note = 2'-O-methyl modified nucleotide with phosphorothioate linkage
  modified_base 3: mod_base = OTHER; note = 2'-O-methyl modified nucleotide with phosphorothioate linkage
  modified_base 29: mod_base = OTHER; note = 2'-O-methyl modified nucleotide
  modified_base 30: mod_base = OTHER; note = 2'-O-methyl modified nucleotide
  modified_base 31: mod_base = OTHER; note = 2'-O-methyl modified nucleotide
  modified_base 32: mod_base = OTHER; note = 2'-O-methyl modified nucleotide
  modified_base 33: mod_base = OTHER; note = 2'-O-methyl modified nucleotide
  modified_base 34: mod_base = OTHER; note = 2'-O-methyl modified nucleotide
  modified_base 35: mod_base = OTHER; note = 2'-O-methyl modified nucleotide
  modified_base 36: mod_base = OTHER; note = 2'-O-methyl modified nucleotide
  modified_base 37: mod_base = OTHER; note = 2'-O-methyl modified nucleotide
  modified_base 38: mod_base = OTHER; note = 2'-O-methyl modified nucleotide
  modified_base 39: mod_base = OTHER; note = 2'-O-methyl modified nucleotide
  modified_base 40: mod_base = OTHER; note = 2'-O-methyl modified nucleotide
  modified_base 69: mod_base = OTHER; note = 2'-O-methyl modified nucleotide
  modified_base 70: mod_base = OTHER; note = 2'-O-methyl modified nucleotide
  modified_base 71: mod_base = OTHER; note = 2'-O-methyl modified nucleotide
  modified_base 72: mod_base = OTHER; note = 2'-O-methyl modified nucleotide
  modified_base 73: mod_base = OTHER; note = 2'-O-methyl modified nucleotide
  modified_base 74: mod_base = OTHER; note = 2'-O-methyl modified nucleotide
  modified_base 75: mod_base = OTHER; note = 2'-O-methyl modified nucleotide
  modified_base 76: mod_base = OTHER; note = 2'-O-methyl modified nucleotide
  modified_base 77: mod_base = OTHER; note = 2'-O-methyl modified nucleotide
  modified_base 78: mod_base = OTHER; note = 2'-O-methyl modified nucleotide
  modified_base 79: mod_base = OTHER; note = 2'-O-methyl modified nucleotide
  modified_base 80: mod_base = OTHER; note = 2'-O-methyl modified nucleotide
  modified_base 81: mod_base = OTHER; note = 2'-O-methyl modified nucleotide
  modified_base 82: mod_base = OTHER; note = 2'-O-methyl modified nucleotide
  modified_base 83: mod_base = OTHER; note = 2'-O-methyl modified nucleotide
  modified_base 84: mod_base = OTHER; note = 2'-O-methyl modified nucleotide
  modified_base 85: mod_base = OTHER; note = 2'-O-methyl modified nucleotide
  modified_base 86: mod_base = OTHER; note = 2'-O-methyl modified nucleotide
  modified_base 87: mod_base = OTHER; note = 2'-O-methyl modified nucleotide
  modified_base 88: mod_base = OTHER; note = 2'-O-methyl modified nucleotide
  modified_base 89: mod_base = OTHER; note = 2'-O-methyl modified nucleotide
  modified_base 90: mod_base = OTHER; note = 2'-O-methyl modified nucleotide
  modified_base 91: mod_base = OTHER; note = 2'-O-methyl modified nucleotide
  modified_base 92: mod_base = OTHER; note = 2'-O-methyl modified nucleotide
  modified_base 93: mod_base = OTHER; note = 2'-O-methyl modified nucleotide
  modified_base 94: mod_base = OTHER; note = 2'-O-methyl modified nucleotide
  modified_base 95: mod_base = OTHER; note = 2'-O-methyl modified nucleotide
  modified_base 96: mod_base = OTHER; note = 2'-O-methyl modified nucleotide
  modified_base 119: mod_base = OTHER; note = Nucleotide with phosphorothioate linkage
  modified_base 120: mod_base = OTHER; note = 2'-O-methyl modified nucleotide with phosphorothioate linkage
  modified_base 121: mod_base = OTHER; note = 2'-O-methyl modified nucleotide with phosphorothioate linkage
  modified_base 122: mod_base = OTHER; note = 2'-O-methyl modified nucleotide
actcacgctggatagcctccgttttagagctagaaatagcaagttaaaataaggctagtccgttatcaacttgaaaaagtggcaccgagtcggtgctctggcctggatgatgggctatccag

SEQ ID NO: 17623 - RNA, 121 nt, synthetic construct
  source 1..121: mol_type = other RNA
  modified_base 1: mod_base = OTHER; note = 2'-O-methyl modified nucleotide with phosphorothioate linkage
  modified_base 2: mod_base = OTHER; note = 2'-O-methyl modified nucleotide with phosphorothioate linkage
  modified_base 3: mod_base = OTHER; note = 2'-O-methyl modified nucleotide with phosphorothioate linkage
  modified_base 29: mod_base = OTHER; note = 2'-O-methyl modified nucleotide
  modified_base 30: mod_base = OTHER; note = 2'-O-methyl modified nucleotide
  modified_base 31: mod_base = OTHER; note = 2'-O-methyl modified nucleotide
  modified_base 32: mod_base = OTHER; note = 2'-O-methyl modified nucleotide
  modified_base 33: mod_base = OTHER; note = 2'-O-methyl modified nucleotide
  modified_base 34: mod_base = OTHER; note = 2'-O-methyl modified nucleotide
  modified_base 35: mod_base = OTHER; note = 2'-O-methyl modified nucleotide
  modified_base 36: mod_base = OTHER; note = 2'-O-methyl modified nucleotide
  modified_base 37: mod_base = OTHER; note = 2'-O-methyl modified nucleotide
  modified_base 38: mod_base = OTHER; note = 2'-O-methyl modified nucleotide
  modified_base 39: mod_base = OTHER; note = 2'-O-methyl modified nucleotide
  modified_base 40: mod_base = OTHER; note = 2'-O-methyl modified nucleotide
  modified_base 69: mod_base = OTHER; note = 2'-O-methyl modified nucleotide
  modified_base 70: mod_base = OTHER; note = 2'-O-methyl modified nucleotide
  modified_base 71: mod_base = OTHER; note = 2'-O-methyl modified nucleotide
  modified_base 72: mod_base = OTHER; note = 2'-O-methyl modified nucleotide
  modified_base 73: mod_base = OTHER; note = 2'-O-methyl modified nucleotide
  modified_base 74: mod_base = OTHER; note = 2'-O-methyl modified nucleotide
  modified_base 75: mod_base = OTHER; note = 2'-O-methyl modified nucleotide
  modified_base 76: mod_base = OTHER; note = 2'-O-methyl modified nucleotide
  modified_base 77: mod_base = OTHER; note = 2'-O-methyl modified nucleotide
  modified_base 78: mod_base = OTHER; note = 2'-O-methyl modified nucleotide
  modified_base 79: mod_base = OTHER; note = 2'-O-methyl modified nucleotide
  modified_base 80: mod_base = OTHER; note = 2'-O-methyl modified nucleotide
  modified_base 81: mod_base = OTHER; note = 2'-O-methyl modified nucleotide
  modified_base 82: mod_base = OTHER; note = 2'-O-methyl modified nucleotide
  modified_base 83: mod_base = OTHER; note = 2'-O-methyl modified nucleotide
  modified_base 84: mod_base = OTHER; note = 2'-O-methyl modified nucleotide
  modified_base 85: mod_base = OTHER; note = 2'-O-methyl modified nucleotide
  modified_base 86: mod_base = OTHER; note = 2'-O-methyl modified nucleotide
  modified_base 87: mod_base = OTHER; note = 2'-O-methyl modified nucleotide
  modified_base 88: mod_base = OTHER; note = 2'-O-methyl modified nucleotide
  modified_base 89: mod_base = OTHER; note = 2'-O-methyl modified nucleotide
  modified_base 90: mod_base = OTHER; note = 2'-O-methyl modified nucleotide
  modified_base 91: mod_base = OTHER; note = 2'-O-methyl modified nucleotide
  modified_base 92: mod_base = OTHER; note = 2'-O-methyl modified nucleotide
  modified_base 93: mod_base = OTHER; note = 2'-O-methyl modified nucleotide
  modified_base 94: mod_base = OTHER; note = 2'-O-methyl modified nucleotide
  modified_base 95: mod_base = OTHER; note = 2'-O-methyl modified nucleotide
  modified_base 96: mod_base = OTHER; note = 2'-O-methyl modified nucleotide
  modified_base 118: mod_base = OTHER; note = Nucleotide with phosphorothioate linkage
  modified_base 119: mod_base = OTHER; note = 2'-O-methyl modified nucleotide with phosphorothioate linkage
  modified_base 120: mod_base = OTHER; note = 2'-O-methyl modified nucleotide with phosphorothioate linkage
  modified_base 121: mod_base = OTHER; note = 2'-O-methyl modified nucleotide
actcacgctggatagcctccgttttagagctagaaatagcaagttaaaataaggctagtccgttatcaacttgaaaaagtggcaccgagtcggtgctctggcctggatgatgggctatcca

SEQ ID NO: 17624 - RNA, 120 nt, synthetic construct
  source 1..120: mol_type = other RNA
  modified_base 1: mod_base = OTHER; note = 2'-O-methyl modified nucleotide with phosphorothioate linkage
  modified_base 2: mod_base = OTHER; note = 2'-O-methyl modified nucleotide with phosphorothioate linkage
  modified_base 3: mod_base = OTHER; note = 2'-O-methyl modified nucleotide with phosphorothioate linkage
  modified_base 29: mod_base = OTHER; note = 2'-O-methyl modified nucleotide
  modified_base 30: mod_base = OTHER; note = 2'-O-methyl modified nucleotide
  modified_base 31: mod_base = OTHER; note = 2'-O-methyl modified nucleotide
  modified_base 32: mod_base = OTHER; note = 2'-O-methyl modified nucleotide
  modified_base 33: mod_base = OTHER; note = 2'-O-methyl modified nucleotide
  modified_base 34: mod_base = OTHER; note = 2'-O-methyl modified nucleotide
  modified_base 35: mod_base = OTHER; note = 2'-O-methyl modified nucleotide
  modified_base 36: mod_base = OTHER; note = 2'-O-methyl modified nucleotide
  modified_base 37: mod_base = OTHER; note = 2'-O-methyl modified nucleotide
  modified_base 38: mod_base = OTHER; note = 2'-O-methyl modified nucleotide
  modified_base 39: mod_base = OTHER; note = 2'-O-methyl modified nucleotide
  modified_base 40: mod_base = OTHER; note = 2'-O-methyl modified nucleotide
  modified_base 69: mod_base = OTHER; note = 2'-O-methyl modified nucleotide
  modified_base 70: mod_base = OTHER; note = 2'-O-methyl modified nucleotide
  modified_base 71: mod_base = OTHER; note = 2'-O-methyl modified nucleotide
  modified_base 72: mod_base = OTHER; note = 2'-O-methyl modified nucleotide
  modified_base 73: mod_base = OTHER; note = 2'-O-methyl modified nucleotide
  modified_base 74: mod_base = OTHER; note = 2'-O-methyl modified nucleotide
  modified_base 75: mod_base = OTHER; note = 2'-O-methyl modified nucleotide
  modified_base 76: mod_base = OTHER; note = 2'-O-methyl modified nucleotide
  modified_base 77: mod_base = OTHER; note = 2'-O-methyl modified nucleotide
  modified_base 78: mod_base = OTHER; note = 2'-O-methyl modified nucleotide
  modified_base 79: mod_base = OTHER; note = 2'-O-methyl modified nucleotide
  modified_base 80: mod_base = OTHER; note = 2'-O-methyl modified nucleotide
  modified_base 81: mod_base = OTHER; note = 2'-O-methyl modified nucleotide
  modified_base 82: mod_base = OTHER; note = 2'-O-methyl modified nucleotide
  modified_base 83: mod_base = OTHER; note = 2'-O-methyl modified nucleotide
  modified_base 84: mod_base = OTHER; note = 2'-O-methyl modified nucleotide
  modified_base 85: mod_base = OTHER; note = 2'-O-methyl modified nucleotide
  modified_base 86: mod_base = OTHER; note = 2'-O-methyl modified nucleotide
  modified_base 87: mod_base = OTHER; note = 2'-O-methyl modified nucleotide
  modified_base 88: mod_base = OTHER; note = 2'-O-methyl modified nucleotide
  modified_base 89: mod_base = OTHER; note = 2'-O-methyl modified nucleotide
  modified_base 90: mod_base = OTHER; note = 2'-O-methyl modified nucleotide
  modified_base 91: mod_base = OTHER; note = 2'-O-methyl modified nucleotide
  modified_base 92: mod_base = OTHER; note = 2'-O-methyl modified nucleotide
  modified_base 93: mod_base = OTHER; note = 2'-O-methyl modified nucleotide
  modified_base 94: mod_base = OTHER; note = 2'-O-methyl modified nucleotide
  modified_base 95: mod_base = OTHER; note = 2'-O-methyl modified nucleotide
  modified_base 96: mod_base = OTHER; note = 2'-O-methyl modified nucleotide
  modified_base 117: mod_base = OTHER; note = Nucleotide with phosphorothioate linkage
  modified_base 118: mod_base = OTHER; note = 2'-O-methyl modified nucleotide with phosphorothioate linkage
  modified_base 119: mod_base = OTHER; note = 2'-O-methyl modified nucleotide with phosphorothioate linkage
  modified_base 120: mod_base = OTHER; note = 2'-O-methyl modified nucleotide
actcacgctggatagcctccgttttagagctagaaatagcaagttaaaataaggctagtccgttatcaacttgaaaaagtggcaccgagtcggtgctctggcctggatgatgggctatcc

SEQ ID NO: 17625 - RNA, 127 nt, synthetic construct
  source 1..127: mol_type = other RNA
  modified_base 1: mod_base = OTHER; note = 2'-O-methyl modified nucleotide with phosphorothioate linkage
  modified_base 2: mod_base = OTHER; note = 2'-O-methyl modified nucleotide with phosphorothioate linkage
  modified_base 3: mod_base = OTHER; note = 2'-O-methyl modified nucleotide with phosphorothioate linkage
  modified_base 29: mod_base = OTHER; note = 2'-O-methyl modified nucleotide
  modified_base 30: mod_base = OTHER; note = 2'-O-methyl modified nucleotide
  modified_base 31: mod_base = OTHER; note = 2'-O-methyl modified nucleotide
  modified_base 32: mod_base = OTHER; note = 2'-O-methyl modified nucleotide
  modified_base 33: mod_base = OTHER; note = 2'-O-methyl modified nucleotide
  modified_base 34: mod_base = OTHER; note = 2'-O-methyl modified nucleotide
  modified_base 35: mod_base = OTHER; note = 2'-O-methyl modified nucleotide
  modified_base 36: mod_base = OTHER; note = 2'-O-methyl modified nucleotide
  modified_base 37: mod_base = OTHER; note = 2'-O-methyl modified nucleotide
  modified_base 38: mod_base = OTHER; note = 2'-O-methyl modified nucleotide
  modified_base 39: mod_base = OTHER; note = 2'-O-methyl modified nucleotide
  modified_base 40: mod_base = OTHER; note = 2'-O-methyl modified nucleotide
  modified_base 69: mod_base = OTHER; note = 2'-O-methyl modified nucleotide
  modified_base 70: mod_base = OTHER; note = 2'-O-methyl modified nucleotide
  modified_base 71: mod_base = OTHER; note = 2'-O-methyl modified nucleotide
  modified_base 72: mod_base = OTHER; note = 2'-O-methyl modified nucleotide
  modified_base 73: mod_base = OTHER; note = 2'-O-methyl modified nucleotide
  modified_base 74: mod_base = OTHER; note = 2'-O-methyl modified nucleotide
  modified_base 75: mod_base = OTHER; note = 2'-O-methyl modified nucleotide
  modified_base 76: mod_base = OTHER; note = 2'-O-methyl modified nucleotide
  modified_base 77: mod_base = OTHER; note = 2'-O-methyl modified nucleotide
  modified_base 78: mod_base = OTHER; note = 2'-O-methyl modified nucleotide
  modified_base 79: mod_base = OTHER; note = 2'-O-methyl modified nucleotide
  modified_base 80: mod_base = OTHER; note = 2'-O-methyl modified nucleotide
  modified_base 81: mod_base = OTHER; note = 2'-O-methyl modified nucleotide
  modified_base 82: mod_base = OTHER; note = 2'-O-methyl modified nucleotide
  modified_base 83: mod_base = OTHER; note = 2'-O-methyl modified nucleotide
  modified_base 84: mod_base = OTHER; note = 2'-O-methyl modified nucleotide
  modified_base 85: mod_base = OTHER; note = 2'-O-methyl modified nucleotide
  modified_base 86: mod_base = OTHER; note = 2'-O-methyl modified nucleotide
  modified_base 87: mod_base = OTHER; note = 2'-O-methyl modified nucleotide
  modified_base 88: mod_base = OTHER; note = 2'-O-methyl modified nucleotide
  modified_base 89: mod_base = OTHER; note = 2'-O-methyl modified nucleotide
  modified_base 90: mod_base = OTHER; note = 2'-O-methyl modified nucleotide
  modified_base 91: mod_base = OTHER; note = 2'-O-methyl modified nucleotide
  modified_base 92: mod_base = OTHER; note = 2'-O-methyl modified nucleotide
  modified_base 93: mod_base = OTHER; note = 2'-O-methyl modified nucleotide
  modified_base 94: mod_base = OTHER; note = 2'-O-methyl modified nucleotide
  modified_base 95: mod_base = OTHER; note = 2'-O-methyl modified nucleotide
  modified_base 96: mod_base = OTHER; note = 2'-O-methyl modified nucleotide
  modified_base 124: mod_base = OTHER; note = Nucleotide with phosphorothioate linkage
  modified_base 125: mod_base = OTHER; note = 2'-O-methyl modified nucleotide with phosphorothioate linkage
  modified_base 126: mod_base = OTHER; note = 2'-O-methyl modified nucleotide with phosphorothioate linkage
  modified_base 127: mod_base = OTHER; note = 2'-O-methyl modified nucleotide
actcacgctggatagcctccgttttagagctagaaatagcaagttaaaataaggctagtccgttatcaacttgaaaaagtggcaccgagtcggtgctttctggcctggatgatgggctatccagcgt

SEQ ID NO: 17626 - RNA, 126 nt, synthetic construct
  source 1..126: mol_type = other RNA
  modified_base 1: mod_base = OTHER; note = 2'-O-methyl modified nucleotide with phosphorothioate linkage
  modified_base 2: mod_base = OTHER; note = 2'-O-methyl modified nucleotide with phosphorothioate linkage
  modified_base 3: mod_base = OTHER; note = 2'-O-methyl modified nucleotide with phosphorothioate linkage
  modified_base 29: mod_base = OTHER; note = 2'-O-methyl modified nucleotide
  modified_base 30: mod_base = OTHER; note = 2'-O-methyl modified nucleotide
  modified_base 31: mod_base = OTHER; note = 2'-O-methyl modified nucleotide
  modified_base 32: mod_base = OTHER; note = 2'-O-methyl modified nucleotide
  modified_base 33: mod_base = OTHER; note = 2'-O-methyl modified nucleotide
  modified_base 34: mod_base = OTHER; note = 2'-O-methyl modified nucleotide
  modified_base 35: mod_base = OTHER; note = 2'-O-methyl modified nucleotide
  modified_base 36: mod_base = OTHER; note = 2'-O-methyl modified nucleotide
  modified_base 37: mod_base = OTHER; note = 2'-O-methyl modified nucleotide
  modified_base 38: mod_base = OTHER; note = 2'-O-methyl modified nucleotide
  modified_base 39: mod_base = OTHER; note = 2'-O-methyl modified nucleotide
  modified_base 40: mod_base = OTHER; note = 2'-O-methyl modified nucleotide
  modified_base 69: mod_base = OTHER; note = 2'-O-methyl modified nucleotide
  modified_base 70: mod_base = OTHER; note = 2'-O-methyl modified nucleotide
  modified_base 71: mod_base = OTHER; note = 2'-O-methyl modified nucleotide
  modified_base 72: mod_base = OTHER; note = 2'-O-methyl modified nucleotide
  modified_base 73: mod_base = OTHER; note = 2'-O-methyl modified nucleotide
  modified_base 74: mod_base = OTHER; note = 2'-O-methyl modified nucleotide
  modified_base 75: mod_base = OTHER; note = 2'-O-methyl modified nucleotide
  modified_base 76: mod_base = OTHER; note = 2'-O-methyl modified nucleotide
  modified_base 77: mod_base = OTHER; note = 2'-O-methyl modified nucleotide
  modified_base 78: mod_base = OTHER; note = 2'-O-methyl modified nucleotide
  modified_base 79: mod_base = OTHER; note = 2'-O-methyl modified nucleotide
  modified_base 80: mod_base = OTHER; note = 2'-O-methyl modified nucleotide
  modified_base 81: mod_base = OTHER; note = 2'-O-methyl modified nucleotide
  modified_base 82: mod_base = OTHER; note = 2'-O-methyl modified nucleotide
  modified_base 83: mod_base = OTHER; note = 2'-O-methyl modified nucleotide
  modified_base 84: mod_base = OTHER; note = 2'-O-methyl modified nucleotide
  modified_base 85: mod_base = OTHER; note = 2'-O-methyl modified nucleotide
  modified_base 86: mod_base = OTHER; note = 2'-O-methyl modified nucleotide
  modified_base 87: mod_base = OTHER; note = 2'-O-methyl modified nucleotide
  modified_base 88: mod_base = OTHER; note = 2'-O-methyl modified nucleotide
  modified_base 89: mod_base = OTHER; note = 2'-O-methyl modified nucleotide
  modified_base 90: mod_base = OTHER; note = 2'-O-methyl modified nucleotide
  modified_base 91: mod_base = OTHER; note = 2'-O-methyl modified nucleotide
  modified_base 92: mod_base = OTHER; note = 2'-O-methyl modified nucleotide
  modified_base 93: mod_base = OTHER; note = 2'-O-methyl modified nucleotide
  modified_base 94: mod_base = OTHER; note = 2'-O-methyl modified nucleotide
  modified_base 95: mod_base = OTHER; note = 2'-O-methyl modified nucleotide
  modified_base 96: mod_base = OTHER; note = 2'-O-methyl modified nucleotide
  modified_base 123: mod_base = OTHER; note = Nucleotide with phosphorothioate linkage
  modified_base 124: mod_base = OTHER; note = 2'-O-methyl modified nucleotide with phosphorothioate linkage
  modified_base 125: mod_base = OTHER; note = 2'-O-methyl modified nucleotide with phosphorothioate linkage
  modified_base 126: mod_base = OTHER; note = 2'-O-methyl modified nucleotide
actcacgctggatagcctccgttttagagctagaaatagcaagttaaaataaggctagtccgttatcaacttgaaaaagtggcaccgagtcggtgctttctggcctggatgatgggctatccagcg

SEQ ID NO: 17627 - RNA, 125 nt, synthetic construct; identical to SEQ ID NO: 15005
  source 1..125: mol_type = other RNA
  modified_base 1: mod_base = OTHER; note = 2'-O-methyl modified nucleotide with phosphorothioate linkage
  modified_base 2: mod_base = OTHER; note = 2'-O-methyl modified nucleotide with phosphorothioate linkage
  modified_base 3: mod_base = OTHER; note = 2'-O-methyl modified nucleotide with phosphorothioate linkage
  modified_base 29: mod_base = OTHER; note = 2'-O-methyl modified nucleotide
  modified_base 30: mod_base = OTHER; note = 2'-O-methyl modified nucleotide
  modified_base 31: mod_base = OTHER; note = 2'-O-methyl modified nucleotide
  modified_base 32: mod_base = OTHER; note = 2'-O-methyl modified nucleotide
  modified_base 33: mod_base = OTHER; note = 2'-O-methyl modified nucleotide
  modified_base 34: mod_base = OTHER; note = 2'-O-methyl modified nucleotide
  modified_base 35: mod_base = OTHER; note = 2'-O-methyl modified nucleotide
  modified_base 36: mod_base = OTHER; note = 2'-O-methyl modified nucleotide
  modified_base 37: mod_base = OTHER; note = 2'-O-methyl modified nucleotide
  modified_base 38: mod_base = OTHER; note = 2'-O-methyl modified nucleotide
  modified_base 39: mod_base = OTHER; note = 2'-O-methyl modified nucleotide
  modified_base 40: mod_base = OTHER; note = 2'-O-methyl modified nucleotide
  modified_base 69: mod_base = OTHER; note = 2'-O-methyl modified nucleotide
  modified_base 70: mod_base = OTHER; note = 2'-O-methyl modified nucleotide
  modified_base 71: mod_base = OTHER; note = 2'-O-methyl modified nucleotide
  modified_base 72: mod_base = OTHER; note = 2'-O-methyl modified nucleotide
  modified_base 73: mod_base = OTHER; note = 2'-O-methyl modified nucleotide
  modified_base 74: mod_base = OTHER; note = 2'-O-methyl modified nucleotide
  modified_base 75: mod_base = OTHER; note = 2'-O-methyl modified nucleotide
  modified_base 76: mod_base = OTHER; note = 2'-O-methyl modified nucleotide
  modified_base 77: mod_base = OTHER; note = 2'-O-methyl modified nucleotide
  modified_base 78: mod_base = OTHER; note = 2'-O-methyl modified nucleotide
  modified_base 79: mod_base = OTHER; note = 2'-O-methyl modified nucleotide
  modified_base 80: mod_base = OTHER; note = 2'-O-methyl modified nucleotide
  modified_base 81: mod_base = OTHER; note = 2'-O-methyl modified nucleotide
  modified_base 82: mod_base = OTHER; note = 2'-O-methyl modified nucleotide
  modified_base 83: mod_base = OTHER; note = 2'-O-methyl modified nucleotide
  modified_base 84: mod_base = OTHER; note = 2'-O-methyl modified nucleotide
  modified_base 85: mod_base = OTHER; note = 2'-O-methyl modified nucleotide
  modified_base 86: mod_base = OTHER; note = 2'-O-methyl modified nucleotide
  modified_base 87: mod_base = OTHER; note = 2'-O-methyl modified nucleotide
  modified_base 88: mod_base = OTHER; note = 2'-O-methyl modified nucleotide
  modified_base 89: mod_base = OTHER; note = 2'-O-methyl modified nucleotide
  modified_base 90: mod_base = OTHER; note = 2'-O-methyl modified nucleotide
  modified_base 91: mod_base = OTHER; note = 2'-O-methyl modified nucleotide
  modified_base 92: mod_base = OTHER; note = 2'-O-methyl modified nucleotide
  modified_base 93: mod_base = OTHER; note = 2'-O-methyl modified nucleotide
  modified_base 94: mod_base = OTHER; note = 2'-O-methyl modified nucleotide
  modified_base 95: mod_base = OTHER; note = 2'-O-methyl modified nucleotide
  modified_base 96: mod_base = OTHER; note = 2'-O-methyl modified nucleotide
  modified_base 122: mod_base = OTHER; note = Nucleotide with phosphorothioate linkage
  modified_base 123: mod_base = OTHER; note = 2'-O-methyl modified nucleotide with phosphorothioate linkage
  modified_base 124: mod_base = OTHER; note = 2'-O-methyl modified nucleotide with phosphorothioate linkage
  modified_base 125: mod_base = OTHER; note = 2'-O-methyl modified nucleotide

SEQ ID NO: 17628 - RNA, 124 nt, synthetic construct
  source 1..124: mol_type = other RNA
  modified_base 1: mod_base = OTHER; note = 2'-O-methyl modified nucleotide with phosphorothioate linkage
  modified_base 2: mod_base = OTHER; note = 2'-O-methyl modified nucleotide with phosphorothioate linkage
  modified_base 3: mod_base = OTHER; note = 2'-O-methyl modified nucleotide with phosphorothioate linkage
  modified_base 29: mod_base = OTHER; note = 2'-O-methyl modified nucleotide
  modified_base 30: mod_base = OTHER; note = 2'-O-methyl modified nucleotide
  modified_base 31: mod_base = OTHER; note = 2'-O-methyl modified nucleotide
  modified_base 32: mod_base = OTHER; note = 2'-O-methyl modified nucleotide
  modified_base 33: mod_base = OTHER; note = 2'-O-methyl modified nucleotide
  modified_base 34: mod_base = OTHER; note = 2'-O-methyl modified nucleotide
  modified_base 35: mod_base = OTHER; note = 2'-O-methyl modified nucleotide
  modified_base 36: mod_base = OTHER; note = 2'-O-methyl modified nucleotide
  modified_base 37: mod_base = OTHER; note = 2'-O-methyl modified nucleotide
  modified_base 38: mod_base = OTHER; note = 2'-O-methyl modified nucleotide
  modified_base 39: mod_base = OTHER; note = 2'-O-methyl modified nucleotide
  modified_base 40: mod_base = OTHER; note = 2'-O-methyl modified nucleotide
  modified_base 69: mod_base = OTHER; note = 2'-O-methyl modified nucleotide
  modified_base 70: mod_base = OTHER; note = 2'-O-methyl modified nucleotide
  modified_base 71: mod_base = OTHER; note = 2'-O-methyl modified nucleotide
  modified_base 72: mod_base = OTHER; note = 2'-O-methyl modified nucleotide
  modified_base 73: mod_base = OTHER; note = 2'-O-methyl modified nucleotide
  modified_base 74: mod_base = OTHER; note = 2'-O-methyl modified nucleotide
  modified_base 75: mod_base = OTHER; note = 2'-O-methyl modified nucleotide
  modified_base 76: mod_base = OTHER; note = 2'-O-methyl modified nucleotide
  modified_base 77: mod_base = OTHER; note = 2'-O-methyl modified nucleotide
  modified_base 78: mod_base = OTHER; note = 2'-O-methyl modified nucleotide
  modified_base 79: mod_base = OTHER; note = 2'-O-methyl modified nucleotide
  modified_base 80: mod_base = OTHER; note = 2'-O-methyl modified nucleotide
  modified_base 81: mod_base = OTHER; note = 2'-O-methyl modified nucleotide
  modified_base 82: mod_base = OTHER; note = 2'-O-methyl modified nucleotide
  modified_base 83: mod_base = OTHER; note = 2'-O-methyl modified nucleotide
  modified_base 84: mod_base = OTHER; note = 2'-O-methyl modified nucleotide
  modified_base 85: mod_base = OTHER; note = 2'-O-methyl modified nucleotide
  modified_base 86: mod_base = OTHER; note = 2'-O-methyl modified nucleotide
  modified_base 87: mod_base = OTHER; note = 2'-O-methyl modified nucleotide
  modified_base 88: mod_base = OTHER; note = 2'-O-methyl modified nucleotide
  modified_base 89: mod_base = OTHER; note = 2'-O-methyl modified nucleotide
  modified_base 90: mod_base = OTHER; note = 2'-O-methyl modified nucleotide
  modified_base 91: mod_base = OTHER; note = 2'-O-methyl modified nucleotide
  modified_base 92: mod_base = OTHER; note = 2'-O-methyl modified nucleotide
  modified_base 93: mod_base = OTHER; note = 2'-O-methyl modified nucleotide
  modified_base 94: mod_base = OTHER; note = 2'-O-methyl modified nucleotide
  modified_base 95: mod_base = OTHER; note = 2'-O-methyl modified nucleotide
  modified_base 96: mod_base = OTHER; note = 2'-O-methyl modified nucleotide
  modified_base 121: mod_base = OTHER; note = Nucleotide with phosphorothioate linkage
  modified_base 122: mod_base = OTHER; note = 2'-O-methyl modified nucleotide with phosphorothioate linkage
  modified_base 123: mod_base = OTHER; note = 2'-O-methyl modified nucleotide with phosphorothioate linkage
  modified_base 124: mod_base = OTHER; note = 2'-O-methyl modified nucleotide
actcacgctggatagcctccgttttagagctagaaatagcaagttaaaataaggctagtccgttatcaacttgaaaaagtggcaccgagtcggtgctttctggcctggatgatgggctatccag

SEQ ID NO: 17629 - RNA, 123 nt, synthetic construct
  source 1..123: mol_type = other RNA
  modified_base 1: mod_base = OTHER; note = 2'-O-methyl modified nucleotide with phosphorothioate linkage
  modified_base 2: mod_base = OTHER; note = 2'-O-methyl modified nucleotide with phosphorothioate linkage
  modified_base 3: mod_base = OTHER; note = 2'-O-methyl modified nucleotide with phosphorothioate linkage
  modified_base 29: mod_base = OTHER; note = 2'-O-methyl modified nucleotide
  modified_base 30: mod_base = OTHER; note = 2'-O-methyl modified nucleotide
  modified_base 31: mod_base = OTHER; note = 2'-O-methyl modified nucleotide
  modified_base 32: mod_base = OTHER; note = 2'-O-methyl modified nucleotide
  modified_base 33: mod_base = OTHER; note = 2'-O-methyl modified nucleotide
  modified_base 34: mod_base = OTHER; note = 2'-O-methyl modified nucleotide
  modified_base 35: mod_base = OTHER; note = 2'-O-methyl modified nucleotide
  modified_base 36: mod_base = OTHER; note = 2'-O-methyl modified nucleotide
  modified_base 37: mod_base = OTHER; note = 2'-O-methyl modified nucleotide
  modified_base 38: mod_base = OTHER; note = 2'-O-methyl modified nucleotide
  modified_base 39: mod_base = OTHER; note = 2'-O-methyl modified nucleotide
  modified_base 40: mod_base = OTHER; note = 2'-O-methyl modified nucleotide
  modified_base 69: mod_base = OTHER; note = 2'-O-methyl modified nucleotide
  modified_base 70: mod_base = OTHER; note = 2'-O-methyl modified nucleotide
  modified_base 71: mod_base = OTHER; note = 2'-O-methyl modified nucleotide
  modified_base 72: mod_base = OTHER; note = 2'-O-methyl modified nucleotide
  modified_base 73: mod_base = OTHER; note = 2'-O-methyl modified nucleotide
  modified_base 74: mod_base = OTHER; note = 2'-O-methyl modified nucleotide
  modified_base 75: mod_base = OTHER; note = 2'-O-methyl modified nucleotide
  modified_base 76: mod_base = OTHER; note = 2'-O-methyl modified nucleotide
  modified_base 77: mod_base = OTHER; note = 2'-O-methyl modified nucleotide
  modified_base 78: mod_base = OTHER; note = 2'-O-methyl modified nucleotide
  modified_base 79: mod_base = OTHER; note = 2'-O-methyl modified nucleotide
  modified_base 80: mod_base = OTHER; note = 2'-O-methyl modified nucleotide
  modified_base 81: mod_base = OTHER; note = 2'-O-methyl modified nucleotide
  modified_base 82: mod_base = OTHER; note = 2'-O-methyl modified nucleotide
  modified_base 83: mod_base = OTHER; note = 2'-O-methyl modified nucleotide
  modified_base 84: mod_base = OTHER; note = 2'-O-methyl modified nucleotide
  modified_base 85: mod_base = OTHER; note = 2'-O-methyl modified nucleotide
  modified_base 86: mod_base = OTHER; note = 2'-O-methyl modified nucleotide
  modified_base 87: mod_base = OTHER; note = 2'-O-methyl modified nucleotide
  modified_base 88: mod_base = OTHER; note = 2'-O-methyl modified nucleotide
  modified_base 89: mod_base = OTHER; note = 2'-O-methyl modified nucleotide
  modified_base 90: mod_base = OTHER; note = 2'-O-methyl modified nucleotide
  modified_base 91: mod_base = OTHER; note = 2'-O-methyl modified nucleotide
  modified_base 92: mod_base = OTHER; note = 2'-O-methyl modified nucleotide
  modified_base 93: mod_base = OTHER; note = 2'-O-methyl modified nucleotide
  modified_base 94: mod_base = OTHER; note = 2'-O-methyl modified nucleotide
  modified_base 95: mod_base = OTHER; note = 2'-O-methyl modified nucleotide
  modified_base 96: mod_base = OTHER; note = 2'-O-methyl modified nucleotide
  modified_base 120: mod_base = OTHER; note = Nucleotide with phosphorothioate linkage
  modified_base 121: mod_base = OTHER; note = 2'-O-methyl modified nucleotide with phosphorothioate linkage
  modified_base 122: mod_base = OTHER; note = 2'-O-methyl modified nucleotide with phosphorothioate linkage
  modified_base 123: mod_base = OTHER; note = 2'-O-methyl modified nucleotide
actcacgctggatagcctccgttttagagctagaaatagcaagttaaaataaggctagtccgttatcaacttgaaaaagtggcaccgagtcggtgctttctggcctggatgatgggctatcca

SEQ ID NO: 17630 - RNA, 122 nt, synthetic construct
  source 1..122: mol_type = other RNA
  modified_base 1: mod_base = OTHER; note = 2'-O-methyl modified nucleotide with phosphorothioate linkage
  modified_base 2: mod_base = OTHER; note = 2'-O-methyl modified nucleotide with phosphorothioate linkage
  modified_base 3: mod_base = OTHER; note = 2'-O-methyl modified nucleotide with phosphorothioate linkage
  modified_base 29: mod_base = OTHER; note = 2'-O-methyl modified nucleotide
  modified_base 30: mod_base = OTHER; note = 2'-O-methyl modified nucleotide
  modified_base 31: mod_base = OTHER; note = 2'-O-methyl modified nucleotide
  modified_base 32: mod_base = OTHER; note = 2'-O-methyl modified nucleotide
  modified_base 33: mod_base = OTHER; note = 2'-O-methyl modified nucleotide
  modified_base 34: mod_base = OTHER; note = 2'-O-methyl modified nucleotide
  modified_base 35: mod_base = OTHER; note = 2'-O-methyl modified nucleotide
  modified_base 36: mod_base = OTHER; note = 2'-O-methyl modified nucleotide
  modified_base 37: mod_base = OTHER; note = 2'-O-methyl modified nucleotide
  modified_base 38: mod_base = OTHER; note = 2'-O-methyl modified nucleotide
  modified_base 39: mod_base = OTHER; note = 2'-O-methyl modified nucleotide
  modified_base 40: mod_base = OTHER; note = 2'-O-methyl modified nucleotide
  modified_base 69: mod_base = OTHER; note = 2'-O-methyl modified nucleotide
  modified_base 70: mod_base = OTHER; note = 2'-O-methyl modified nucleotide
  modified_base 71: mod_base = OTHER; note = 2'-O-methyl modified nucleotide
  modified_base 72: mod_base = OTHER; note = 2'-O-methyl modified nucleotide
  modified_base 73: mod_base = OTHER; note = 2'-O-methyl modified nucleotide
  modified_base 74: mod_base = OTHER; note = 2'-O-methyl modified nucleotide
  modified_base 75: mod_base = OTHER; note = 2'-O-methyl modified nucleotide
  modified_base 76: mod_base = OTHER; note = 2'-O-methyl modified nucleotide
  modified_base 77: mod_base = OTHER; note = 2'-O-methyl modified nucleotide
  modified_base 78: mod_base = OTHER; note = 2'-O-methyl modified nucleotide
  modified_base 79: mod_base = OTHER; note = 2'-O-methyl modified nucleotide
  modified_base 80: mod_base = OTHER; note = 2'-O-methyl modified nucleotide
  modified_base 81: mod_base = OTHER; note = 2'-O-methyl modified nucleotide
  modified_base 82: mod_base = OTHER; note = 2'-O-methyl modified nucleotide
  modified_base 83: mod_base = OTHER; note = 2'-O-methyl modified nucleotide
  modified_base 84: mod_base = OTHER; note = 2'-O-methyl modified nucleotide
  modified_base 85: mod_base = OTHER; note = 2'-O-methyl modified nucleotide
  modified_base 86: mod_base = OTHER; note = 2'-O-methyl modified nucleotide
  modified_base 87: mod_base = OTHER; note = 2'-O-methyl modified nucleotide
  modified_base 88: mod_base = OTHER; note = 2'-O-methyl modified nucleotide
  modified_base 89: mod_base = OTHER; note = 2'-O-methyl modified nucleotide
  modified_base 90: mod_base = OTHER; note = 2'-O-methyl modified nucleotide
  modified_base 91: mod_base = OTHER; note = 2'-O-methyl modified nucleotide
  modified_base 92: mod_base = OTHER; note = 2'-O-methyl modified nucleotide
  modified_base 93: mod_base = OTHER; note = 2'-O-methyl modified nucleotide
  modified_base 94: mod_base = OTHER; note = 2'-O-methyl modified nucleotide
  modified_base 95: mod_base = OTHER; note = 2'-O-methyl modified nucleotide
  modified_base 96: mod_base = OTHER; note = 2'-O-methyl modified nucleotide
  modified_base 119: mod_base = OTHER; note = Nucleotide with phosphorothioate linkage
  modified_base 120: mod_base = OTHER; note = 2'-O-methyl modified nucleotide with phosphorothioate linkage
  modified_base 121: mod_base = OTHER; note = 2'-O-methyl modified nucleotide with phosphorothioate linkage
  modified_base 122: mod_base = OTHER; note = 2'-O-methyl modified nucleotide
actcacgctggatagcctccgttttagagctagaaatagcaagttaaaataaggctagtccgttatcaacttgaaaaagtggcaccgagtcggtgctttctggcctggatgatgggctatcc

SEQ ID NO: 17631 - RNA, 129 nt, synthetic construct
  source 1..129: mol_type = other RNA
  modified_base 1: mod_base = OTHER; note = 2'-O-methyl modified nucleotide with phosphorothioate linkage
  modified_base 2: mod_base = OTHER; note = 2'-O-methyl modified nucleotide with phosphorothioate linkage
  modified_base 3: mod_base = OTHER; note = 2'-O-methyl modified nucleotide with phosphorothioate linkage
  modified_base 29: mod_base = OTHER; note = 2'-O-methyl modified nucleotide
  modified_base 30: mod_base = OTHER; note = 2'-O-methyl modified nucleotide
  modified_base 31: mod_base = OTHER; note = 2'-O-methyl modified nucleotide
  modified_base 32: mod_base = OTHER; note = 2'-O-methyl modified nucleotide
  modified_base 33: mod_base = OTHER; note = 2'-O-methyl modified nucleotide
  modified_base 34: mod_base = OTHER; note = 2'-O-methyl modified nucleotide
  modified_base 35: mod_base = OTHER; note = 2'-O-methyl modified nucleotide
  modified_base 36: mod_base = OTHER; note = 2'-O-methyl modified nucleotide
  modified_base 37: mod_base = OTHER; note = 2'-O-methyl modified nucleotide
  modified_base 38: mod_base = OTHER; note = 2'-O-methyl modified nucleotide
  modified_base 39: mod_base = OTHER; note = 2'-O-methyl modified nucleotide
  modified_base 40: mod_base = OTHER; note = 2'-O-methyl modified nucleotide
  modified_base 69: mod_base = OTHER; note = 2'-O-methyl modified nucleotide
  modified_base 70: mod_base = OTHER; note = 2'-O-methyl modified nucleotide
  modified_base 71: mod_base = OTHER; note = 2'-O-methyl modified nucleotide
  modified_base 72: mod_base = OTHER; note = 2'-O-methyl modified nucleotide
  modified_base 73: mod_base = OTHER; note = 2'-O-methyl modified nucleotide
  modified_base 74: mod_base = OTHER; note = 2'-O-methyl modified nucleotide
  modified_base 75: mod_base = OTHER; note = 2'-O-methyl modified nucleotide
  modified_base 76: mod_base = OTHER; note = 2'-O-methyl modified nucleotide
  modified_base 77: mod_base = OTHER; note = 2'-O-methyl modified nucleotide
  modified_base 78: mod_base = OTHER; note = 2'-O-methyl modified nucleotide
  modified_base 79: mod_base = OTHER; note = 2'-O-methyl modified nucleotide
  modified_base 80: mod_base = OTHER; note = 2'-O-methyl modified nucleotide
  modified_base 81: mod_base = OTHER; note = 2'-O-methyl modified nucleotide
  modified_base 82: mod_base = OTHER; note = 2'-O-methyl modified nucleotide
  modified_base 83: mod_base = OTHER; note = 2'-O-methyl modified nucleotide
  modified_base 84: mod_base = OTHER; note = 2'-O-methyl modified nucleotide
  modified_base 85: mod_base = OTHER; note = 2'-O-methyl modified nucleotide
  modified_base 86: mod_base = OTHER; note = 2'-O-methyl modified nucleotide
  modified_base 87: mod_base = OTHER; note = 2'-O-methyl modified nucleotide
  modified_base 88: mod_base = OTHER; note = 2'-O-methyl modified nucleotide
  modified_base 89: mod_base = OTHER; note = 2'-O-methyl modified nucleotide
  modified_base 90: mod_base = OTHER; note = 2'-O-methyl modified nucleotide
  modified_base 91: mod_base = OTHER; note = 2'-O-methyl modified nucleotide
  modified_base 92: mod_base = OTHER; note = 2'-O-methyl modified nucleotide
  modified_base 93: mod_base = OTHER; note = 2'-O-methyl modified nucleotide
  modified_base 94: mod_base = OTHER; note = 2'-O-methyl modified nucleotide
  modified_base 95: mod_base = OTHER; note = 2'-O-methyl modified nucleotide
  modified_base 96: mod_base = OTHER; note = 2'-O-methyl modified nucleotide
  modified_base 126: mod_base = OTHER; note = Nucleotide with phosphorothioate linkage
  modified_base 127: mod_base = OTHER; note = 2'-O-methyl modified nucleotide with phosphorothioate linkage
  modified_base 128: mod_base = OTHER; note = 2'-O-methyl modified nucleotide with phosphorothioate linkage
  modified_base 129: mod_base = OTHER; note = 2'-O-methyl modified nucleotide
actcacgctggatagcctccgttttagagctagaaatagcaagttaaaataaggctagtccgttatcaacttgaaaaagtggcaccgagtcggtgctctttctggcctggatgatgggctatccagcgt

SEQ ID NO: 17632 - RNA, 128 nt, synthetic construct
  source 1..128: mol_type = other RNA
  modified_base 1: mod_base = OTHER; note = 2'-O-methyl modified nucleotide with phosphorothioate linkage
  modified_base 2: mod_base = OTHER; note = 2'-O-methyl modified nucleotide with phosphorothioate linkage
  modified_base 3: mod_base = OTHER; note = 2'-O-methyl modified nucleotide with phosphorothioate linkage
  modified_base 29: mod_base = OTHER; note = 2'-O-methyl modified nucleotide
  modified_base 30: mod_base = OTHER; note = 2'-O-methyl modified nucleotide
  modified_base 31: mod_base = OTHER; note = 2'-O-methyl modified nucleotide
  modified_base 32: mod_base = OTHER; note = 2'-O-methyl modified nucleotide
  modified_base 33: mod_base = OTHER; note = 2'-O-methyl modified nucleotide
  modified_base 34: mod_base = OTHER; note = 2'-O-methyl modified nucleotide
  modified_base 35: mod_base = OTHER; note = 2'-O-methyl modified nucleotide
  modified_base 36: mod_base = OTHER; note = 2'-O-methyl modified nucleotide
  modified_base 37: mod_base = OTHER; note = 2'-O-methyl modified nucleotide
  modified_base 38: mod_base = OTHER; note = 2'-O-methyl modified nucleotide
  modified_base 39: mod_base = OTHER; note = 2'-O-methyl modified nucleotide
  modified_base 40: mod_base = OTHER; note = 2'-O-methyl modified nucleotide
  modified_base 69: mod_base = OTHER; note = 2'-O-methyl modified nucleotide
  modified_base 70: mod_base = OTHER; note = 2'-O-methyl modified nucleotide
  modified_base 71: mod_base = OTHER; note = 2'-O-methyl modified nucleotide
  modified_base 72: mod_base = OTHER; note = 2'-O-methyl modified nucleotide
  modified_base 73: mod_base = OTHER; note = 2'-O-methyl modified nucleotide
  modified_base 74: mod_base = OTHER; note = 2'-O-methyl modified nucleotide
  modified_base 75: mod_base = OTHER; note = 2'-O-methyl modified nucleotide
  modified_base 76: mod_base = OTHER; note = 2'-O-methyl modified nucleotide
  modified_base 77: mod_base = OTHER; note = 2'-O-methyl modified nucleotide
  modified_base 78: mod_base = OTHER; note = 2'-O-methyl modified nucleotide
  modified_base 79: mod_base = OTHER; note = 2'-O-methyl modified nucleotide
  modified_base 80: mod_base = OTHER; note = 2'-O-methyl modified nucleotide
  modified_base 81: mod_base = OTHER; note = 2'-O-methyl modified nucleotide
  modified_base 82: mod_base = OTHER; note = 2'-O-methyl modified nucleotide
  modified_base 83: mod_base = OTHER; note = 2'-O-methyl modified nucleotide
  modified_base 84: mod_base = OTHER; note = 2'-O-methyl modified nucleotide
  modified_base 85: mod_base = OTHER; note = 2'-O-methyl modified nucleotide
  modified_base 86: mod_base = OTHER; note = 2'-O-methyl modified nucleotide
  modified_base 87: mod_base = OTHER; note = 2'-O-methyl modified nucleotide
  modified_base 88: mod_base = OTHER; note = 2'-O-methyl modified nucleotide
  modified_base 89: mod_base = OTHER; note = 2'-O-methyl modified nucleotide
  modified_base 90: mod_base = OTHER; note = 2'-O-methyl modified nucleotide
  modified_base 91: mod_base = OTHER; note = 2'-O-methyl modified nucleotide
  modified_base 92: mod_base = OTHER; note = 2'-O-methyl modified nucleotide
  modified_base 93: mod_base = OTHER; note = 2'-O-methyl modified nucleotide
  modified_base 94: mod_base = OTHER; note = 2'-O-methyl modified nucleotide
  modified_base 95: mod_base = OTHER; note = 2'-O-methyl modified nucleotide
  modified_base 96: mod_base = OTHER; note = 2'-O-methyl modified nucleotide
  modified_base 125: mod_base = OTHER; note = Nucleotide with phosphorothioate linkage
  modified_base 126: mod_base = OTHER; note = 2'-O-methyl modified nucleotide with phosphorothioate linkage
  modified_base 127: mod_base = OTHER; note = 2'-O-methyl modified nucleotide with phosphorothioate linkage
  modified_base 128: mod_base = OTHER; note = 2'-O-methyl modified nucleotide
actcacgctggatagcctccgttttagagctagaaatagcaagttaaaataaggctagtccgttatcaacttgaaaaagtggcaccgagtcggtgctctttctggcctggatgatgggctatccagcg

SEQ ID NO: 17633 - RNA, 127 nt, synthetic construct
  source 1..127: mol_type = other RNA
  modified_base 1: mod_base = OTHER; note = 2'-O-methyl modified nucleotide with phosphorothioate linkage
  modified_base 2: mod_base = OTHER; note = 2'-O-methyl modified nucleotide with phosphorothioate linkage
  modified_base 3: mod_base = OTHER; note = 2'-O-methyl modified nucleotide with phosphorothioate linkage
  modified_base 29: mod_base = OTHER; note = 2'-O-methyl modified nucleotide
  modified_base 30: mod_base = OTHER; note = 2'-O-methyl modified nucleotide
  modified_base 31: mod_base = OTHER; note = 2'-O-methyl modified nucleotide
  modified_base 32: mod_base = OTHER; note = 2'-O-methyl modified nucleotide
  modified_base 33: mod_base = OTHER; note = 2'-O-methyl modified nucleotide
  modified_base 34: mod_base = OTHER; note = 2'-O-methyl modified nucleotide
  modified_base 35: mod_base = OTHER; note = 2'-O-methyl modified nucleotide
  modified_base 36: mod_base = OTHER; note = 2'-O-methyl modified nucleotide
  modified_base 37: mod_base = OTHER; note = 2'-O-methyl modified nucleotide
  modified_base 38: mod_base = OTHER; note = 2'-O-methyl modified nucleotide
  modified_base 39: mod_base = OTHER; note = 2'-O-methyl modified nucleotide
  modified_base 40: mod_base = OTHER; note = 2'-O-methyl modified nucleotide
  modified_base 69: mod_base = OTHER; note = 2'-O-methyl modified nucleotide
  modified_base 70: mod_base = OTHER; note = 2'-O-methyl modified nucleotide
  modified_base 71: mod_base = OTHER; note = 2'-O-methyl modified nucleotide
  modified_base 72: mod_base = OTHER; note = 2'-O-methyl modified nucleotide
  modified_base 73: mod_base = OTHER; note = 2'-O-methyl modified nucleotide
  modified_base 74: mod_base = OTHER; note = 2'-O-methyl modified nucleotide
  modified_base 75: mod_base = OTHER; note = 2'-O-methyl modified nucleotide
  modified_base 76: mod_base = OTHER; note = 2'-O-methyl modified nucleotide
  modified_base 77: mod_base = OTHER; note = 2'-O-methyl modified nucleotide
  modified_base 78: mod_base = OTHER; note = 2'-O-methyl modified nucleotide
  modified_base 79: mod_base = OTHER; note = 2'-O-methyl modified nucleotide
  modified_base 80: mod_base = OTHER; note = 2'-O-methyl modified nucleotide
  modified_base 81: mod_base = OTHER; note = 2'-O-methyl modified nucleotide
  modified_base 82: mod_base = OTHER; note = 2'-O-methyl modified nucleotide
  modified_base 83: mod_base = OTHER; note = 2'-O-methyl modified nucleotide
  modified_base 84: mod_base = OTHER; note = 2'-O-methyl modified nucleotide
  modified_base 85: mod_base = OTHER; note = 2'-O-methyl modified nucleotide
  modified_base 86: mod_base = OTHER; note = 2'-O-methyl modified nucleotide
  modified_base 87: mod_base = OTHER; note = 2'-O-methyl modified nucleotide
  modified_base 88: mod_base = OTHER; note = 2'-O-methyl modified nucleotide
  modified_base 89: mod_base = OTHER; note = 2'-O-methyl modified nucleotide
  modified_base 90: mod_base = OTHER; note = 2'-O-methyl modified nucleotide
  modified_base 91: mod_base = OTHER; note = 2'-O-methyl modified nucleotide
  modified_base 92: mod_base = OTHER; note = 2'-O-methyl modified nucleotide
  modified_base 93: mod_base = OTHER; note = 2'-O-methyl modified nucleotide
  modified_base 94: mod_base = OTHER; note = 2'-O-methyl modified nucleotide
  modified_base 95: mod_base = OTHER; note = 2'-O-methyl modified nucleotide
  modified_base 96: mod_base = OTHER; note = 2'-O-methyl modified nucleotide
  modified_base 124: mod_base = OTHER; note = Nucleotide with phosphorothioate linkage
  modified_base 125: mod_base = OTHER; note = 2'-O-methyl modified nucleotide with phosphorothioate linkage
  modified_base 126: mod_base = OTHER; note = 2'-O-methyl modified nucleotide with phosphorothioate linkage
  modified_base 127: mod_base = OTHER; note = 2'-O-methyl modified nucleotide
actcacgctggatagcctccgttttagagctagaaatagcaagttaaaataaggctagtccgttatcaacttgaaaaagtggcaccgagtcggtgctctttctggcctggatgatgggctatccagc

SEQ ID NO: 17634 - RNA, 126 nt, synthetic construct
  source 1..126: mol_type = other RNA
  modified_base 1: mod_base = OTHER; note = 2'-O-methyl modified nucleotide with phosphorothioate linkage
  modified_base 2: mod_base = OTHER; note = 2'-O-methyl modified nucleotide with phosphorothioate linkage
  modified_base 3: mod_base = OTHER; note = 2'-O-methyl modified nucleotide with phosphorothioate linkage
  modified_base 29: mod_base = OTHER; note = 2'-O-methyl modified nucleotide
  modified_base 30: mod_base = OTHER; note = 2'-O-methyl modified nucleotide
  modified_base 31: mod_base = OTHER; note = 2'-O-methyl modified nucleotide
  modified_base 32: mod_base = OTHER; note = 2'-O-methyl modified nucleotide
  modified_base 33: mod_base = OTHER; note = 2'-O-methyl modified nucleotide
  modified_base 34: mod_base = OTHER; note = 2'-O-methyl modified nucleotide
  modified_base 35: mod_base = OTHER; note = 2'-O-methyl modified nucleotide
  modified_base 36: mod_base = OTHER; note = 2'-O-methyl modified nucleotide
  modified_base 37: mod_base = OTHER; note = 2'-O-methyl modified nucleotide
  modified_base 38: mod_base = OTHER; note = 2'-O-methyl modified nucleotide
  modified_base 39: mod_base = OTHER; note = 2'-O-methyl modified nucleotide
  modified_base 40: mod_base = OTHER; note = 2'-O-methyl modified nucleotide
  modified_base 69: mod_base = OTHER; note = 2'-O-methyl modified nucleotide
  modified_base 70: mod_base = OTHER; note = 2'-O-methyl modified nucleotide
  modified_base 71: mod_base = OTHER; note = 2'-O-methyl modified nucleotide
  modified_base 72: mod_base = OTHER; note = 2'-O-methyl modified nucleotide
  modified_base 73: mod_base = OTHER; note = 2'-O-methyl modified nucleotide
  modified_base 74: mod_base = OTHER; note = 2'-O-methyl modified nucleotide
  modified_base 75: mod_base = OTHER; note = 2'-O-methyl modified nucleotide
  modified_base 76: mod_base = OTHER; note = 2'-O-methyl modified nucleotide
  modified_base 77: mod_base = OTHER; note = 2'-O-methyl modified nucleotide
  modified_base 78: mod_base = OTHER; note = 2'-O-methyl modified nucleotide
  modified_base 79: mod_base = OTHER; note = 2'-O-methyl modified nucleotide
  modified_base 80: mod_base = OTHER; note = 2'-O-methyl modified nucleotide
  modified_base 81: mod_base = OTHER; note = 2'-O-methyl modified nucleotide
  modified_base 82: mod_base = OTHER; note = 2'-O-methyl modified nucleotide
  modified_base 83: mod_base = OTHER; note = 2'-O-methyl modified nucleotide
  modified_base 84: mod_base = OTHER; note = 2'-O-methyl modified nucleotide
  modified_base 85: mod_base = OTHER; note = 2'-O-methyl modified nucleotide
  modified_base 86: mod_base = OTHER; note = 2'-O-methyl modified nucleotide
  modified_base 87: mod_base = OTHER; note = 2'-O-methyl modified nucleotide
  modified_base 88: mod_base = OTHER; note = 2'-O-methyl modified nucleotide
  modified_base 89: mod_base = OTHER; note = 2'-O-methyl modified nucleotide
  modified_base 90: mod_base = OTHER; note = 2'-O-methyl modified nucleotide
  modified_base 91: mod_base = OTHER; note = 2'-O-methyl modified nucleotide
  modified_base 92: mod_base = OTHER; note = 2'-O-methyl modified nucleotide
  modified_base 93: mod_base = OTHER; note = 2'-O-methyl modified nucleotide
  modified_base 94: mod_base = OTHER; note = 2'-O-methyl modified nucleotide
  modified_base 95: mod_base = OTHER; note = 2'-O-methyl modified nucleotide
  modified_base 96: mod_base = OTHER; note = 2'-O-methyl modified nucleotide
  modified_base 123: mod_base = OTHER; note = Nucleotide with phosphorothioate linkage
  modified_base 124: mod_base = OTHER; note = 2'-O-methyl modified nucleotide with phosphorothioate linkage
  modified_base 125: mod_base = OTHER; note = 2'-O-methyl modified nucleotide with phosphorothioate linkage
  modified_base 126: mod_base = OTHER; note = 2'-O-methyl modified nucleotide
actcacgctggatagcctccgttttagagctagaaatagcaagttaaaataaggctagtccgttatcaacttgaaaaagtggcaccgagtcggtgctctttctggcctggatgatgggctatccag

SEQ ID NO: 17635 - RNA, 125 nt, synthetic construct
  source 1..125: mol_type = other RNA
  modified_base 1: mod_base = OTHER; note = 2'-O-methyl modified nucleotide with phosphorothioate linkage
  modified_base 2: mod_base = OTHER; note = 2'-O-methyl modified nucleotide with phosphorothioate linkage
  modified_base 3: mod_base = OTHER; note = 2'-O-methyl modified nucleotide with phosphorothioate linkage
  modified_base 29: mod_base = OTHER; note = 2'-O-methyl modified nucleotide
  modified_base 30: mod_base = OTHER; note = 2'-O-methyl modified nucleotide
  modified_base 31: mod_base = OTHER; note = 2'-O-methyl modified nucleotide
  modified_base 32: mod_base = OTHER; note = 2'-O-methyl modified nucleotide
  modified_base 33: mod_base = OTHER; note = 2'-O-methyl modified nucleotide
  modified_base 34: mod_base = OTHER; note = 2'-O-methyl modified nucleotide
  modified_base 35: mod_base = OTHER; note = 2'-O-methyl modified nucleotide
  modified_base 36: mod_base = OTHER; note = 2'-O-methyl modified nucleotide
  modified_base 37: mod_base = OTHER; note = 2'-O-methyl modified nucleotide
  modified_base 38: mod_base = OTHER; note = 2'-O-methyl modified nucleotide
  modified_base 39: mod_base = OTHER; note = 2'-O-methyl modified nucleotide
  modified_base 40: mod_base = OTHER; note = 2'-O-methyl modified nucleotide
  modified_base 69: mod_base = OTHER; note = 2'-O-methyl modified nucleotide
  modified_base 70: mod_base = OTHER; note = 2'-O-methyl modified nucleotide
  modified_base 71: mod_base = OTHER; note = 2'-O-methyl modified nucleotide
  modified_base 72: mod_base = OTHER; note = 2'-O-methyl modified nucleotide
  modified_base 73: mod_base = OTHER; note = 2'-O-methyl modified nucleotide
  modified_base 74: mod_base = OTHER; note = 2'-O-methyl modified nucleotide
  modified_base 75: mod_base = OTHER; note = 2'-O-methyl modified nucleotide
  modified_base 76: mod_base = OTHER; note = 2'-O-methyl modified nucleotide
  modified_base 77: mod_base = OTHER; note = 2'-O-methyl modified nucleotide
  modified_base 78: mod_base = OTHER; note = 2'-O-methyl modified nucleotide
  modified_base 79: mod_base = OTHER; note = 2'-O-methyl modified nucleotide
  modified_base 80: mod_base = OTHER; note = 2'-O-methyl modified nucleotide
  modified_base 81: mod_base = OTHER; note = 2'-O-methyl modified nucleotide
  modified_base 82: mod_base = OTHER; note = 2'-O-methyl modified nucleotide
  modified_base 83: mod_base = OTHER; note = 2'-O-methyl modified nucleotide
  modified_base 84: mod_base = OTHER; note = 2'-O-methyl modified nucleotide
  modified_base 85: mod_base = OTHER; note = 2'-O-methyl modified nucleotide
  modified_base 86: mod_base = OTHER; note = 2'-O-methyl modified nucleotide
  modified_base 87: mod_base = OTHER; note = 2'-O-methyl modified nucleotide
  modified_base 88: mod_base = OTHER; note = 2'-O-methyl modified nucleotide
  modified_base 89: mod_base = OTHER; note = 2'-O-methyl modified nucleotide
  modified_base 90: mod_base = OTHER; note = 2'-O-methyl modified nucleotide
  modified_base 91: mod_base = OTHER; note = 2'-O-methyl modified nucleotide
  modified_base 92: mod_base = OTHER; note = 2'-O-methyl modified nucleotide
  modified_base 93: mod_base = OTHER; note = 2'-O-methyl modified nucleotide
  modified_base 94: mod_base = OTHER; note = 2'-O-methyl modified nucleotide
  modified_base 95: mod_base = OTHER; note = 2'-O-methyl modified nucleotide
  modified_base 96: mod_base = OTHER; note = 2'-O-methyl modified nucleotide
  modified_base 122: mod_base = OTHER; note = Nucleotide with phosphorothioate linkage
  modified_base 123: mod_base = OTHER; note = 2'-O-methyl modified nucleotide with phosphorothioate linkage
  modified_base 124: mod_base = OTHER; note = 2'-O-methyl modified nucleotide with phosphorothioate linkage
  modified_base 125: mod_base = OTHER; note = 2'-O-methyl modified nucleotide
actcacgctggatagcctccgttttagagctagaaatagcaagttaaaataaggctagtccgttatcaacttgaaaaagtggcaccgagtcggtgctctttctggcctggatgatgggctatcca

SEQ ID NO: 17636 - RNA, 124 nt, synthetic construct
  source 1..124: mol_type = other RNA
  modified_base 1: mod_base = OTHER; note = 2'-O-methyl modified nucleotide with phosphorothioate linkage
  modified_base 2: mod_base = OTHER; note = 2'-O-methyl modified nucleotide with phosphorothioate linkage
  modified_base 3: mod_base = OTHER; note = 2'-O-methyl modified nucleotide with phosphorothioate linkage
  modified_base 29: mod_base = OTHER; note = 2'-O-methyl modified nucleotide
  modified_base 30: mod_base = OTHER; note = 2'-O-methyl modified nucleotide
  modified_base 31: mod_base = OTHER; note = 2'-O-methyl modified nucleotide
  modified_base 32: mod_base = OTHER; note = 2'-O-methyl modified nucleotide
  modified_base 33: mod_base = OTHER; note = 2'-O-methyl modified nucleotide
  modified_base 34: mod_base = OTHER; note = 2'-O-methyl modified nucleotide
  modified_base 35: mod_base = OTHER; note = 2'-O-methyl modified nucleotide
  modified_base 36: mod_base = OTHER; note = 2'-O-methyl modified nucleotide
  modified_base 37: mod_base = OTHER; note = 2'-O-methyl modified nucleotide
  modified_base 38: mod_base = OTHER; note = 2'-O-methyl modified nucleotide
  modified_base 39: mod_base = OTHER; note = 2'-O-methyl modified nucleotide
  modified_base 40: mod_base = OTHER; note = 2'-O-methyl modified nucleotide
  modified_base 69: mod_base = OTHER; note = 2'-O-methyl modified nucleotide
  modified_base 70: mod_base = OTHER; note = 2'-O-methyl modified nucleotide
  modified_base 71: mod_base = OTHER; note = 2'-O-methyl modified nucleotide
  modified_base 72: mod_base = OTHER; note = 2'-O-methyl modified nucleotide
  modified_base 73: mod_base = OTHER; note = 2'-O-methyl modified nucleotide
  modified_base 74: mod_base = OTHER; note = 2'-O-methyl modified nucleotide
  modified_base 75: mod_base = OTHER; note = 2'-O-methyl modified nucleotide
  modified_base 76: mod_base = OTHER; note = 2'-O-methyl modified nucleotide
  modified_base 77: mod_base = OTHER; note = 2'-O-methyl modified nucleotide
  modified_base 78: mod_base = OTHER; note = 2'-O-methyl modified nucleotide
  modified_base 79: mod_base = OTHER; note = 2'-O-methyl modified nucleotide
  modified_base 80: mod_base = OTHER; note = 2'-O-methyl modified nucleotide
  modified_base 81: mod_base = OTHER; note = 2'-O-methyl modified nucleotide
  modified_base 82: mod_base = OTHER; note = 2'-O-methyl modified nucleotide
  modified_base 83: mod_base = OTHER; note = 2'-O-methyl modified nucleotide
  modified_base 84: mod_base = OTHER; note = 2'-O-methyl modified nucleotide
  modified_base 85: mod_base = OTHER; note = 2'-O-methyl modified nucleotide
  modified_base 86: mod_base = OTHER; note = 2'-O-methyl modified nucleotide
  modified_base 87: mod_base = OTHER; note = 2'-O-methyl modified nucleotide
  modified_base 88: mod_base = OTHER; note = 2'-O-methyl modified nucleotide
  modified_base 89: mod_base = OTHER; note = 2'-O-methyl modified nucleotide
  modified_base 90: mod_base = OTHER; note = 2'-O-methyl modified nucleotide
  modified_base 91: mod_base = OTHER; note = 2'-O-methyl modified nucleotide
  modified_base 92: mod_base = OTHER; note = 2'-O-methyl modified nucleotide
  modified_base 93: mod_base = OTHER; note = 2'-O-methyl modified nucleotide
  modified_base 94: mod_base = OTHER; note = 2'-O-methyl modified nucleotide
  modified_base 95: mod_base = OTHER; note = 2'-O-methyl modified nucleotide
  modified_base 96: mod_base = OTHER; note = 2'-O-methyl modified nucleotide
  modified_base 121: mod_base = OTHER; note = Nucleotide with phosphorothioate linkage
  modified_base 122: mod_base = OTHER; note = 2'-O-methyl modified nucleotide with phosphorothioate linkage
  modified_base 123: mod_base = OTHER; note = 2'-O-methyl modified nucleotide with phosphorothioate linkage
  modified_base 124: mod_base = OTHER; note = 2'-O-methyl modified nucleotide
actcacgctggatagcctccgttttagagctagaaatagcaagttaaaataaggctagtccgttatcaacttgaaaaagtggcaccgagtcggtgctctttctggcctggatgatgggctatcc

SEQ ID NO: 17637 - RNA, 131 nt, synthetic construct
  source 1..131: mol_type = other RNA
  modified_base 1: mod_base = OTHER; note = 2'-O-methyl modified nucleotide with phosphorothioate linkage
  modified_base 2: mod_base = OTHER; note = 2'-O-methyl modified nucleotide with phosphorothioate linkage
  modified_base 3: mod_base = OTHER; note = 2'-O-methyl modified nucleotide with phosphorothioate linkage
  modified_base 29: mod_base = OTHER; note = 2'-O-methyl modified nucleotide
  modified_base 30: mod_base = OTHER; note = 2'-O-methyl modified nucleotide
  modified_base 31: mod_base = OTHER; note = 2'-O-methyl modified nucleotide
  modified_base 32: mod_base = OTHER; note = 2'-O-methyl modified nucleotide
  modified_base 33: mod_base = OTHER; note = 2'-O-methyl modified nucleotide
  modified_base 34: mod_base = OTHER; note = 2'-O-methyl modified nucleotide
  modified_base 35: mod_base = OTHER; note = 2'-O-methyl modified nucleotide
  modified_base 36: mod_base = OTHER; note = 2'-O-methyl modified nucleotide
  modified_base 37: mod_base = OTHER; note = 2'-O-methyl modified nucleotide
  modified_base 38: mod_base = OTHER; note = 2'-O-methyl modified nucleotide
  modified_base 39: mod_base = OTHER; note = 2'-O-methyl modified nucleotide
  modified_base 40: mod_base = OTHER; note = 2'-O-methyl modified nucleotide
  modified_base 69: mod_base = OTHER; note = 2'-O-methyl modified nucleotide
  modified_base 70: mod_base = OTHER; note = 2'-O-methyl modified nucleotide
  modified_base 71: mod_base = OTHER; note = 2'-O-methyl modified nucleotide
  modified_base 72: mod_base = OTHER; note = 2'-O-methyl modified nucleotide
  modified_base 73: mod_base = OTHER; note = 2'-O-methyl modified nucleotide
  modified_base 74: mod_base = OTHER; note = 2'-O-methyl modified nucleotide
  modified_base 75: mod_base = OTHER; note = 2'-O-methyl modified nucleotide
  modified_base 76: mod_base = OTHER; note = 2'-O-methyl modified nucleotide
  modified_base 77: mod_base = OTHER; note = 2'-O-methyl modified nucleotide
  modified_base 78: mod_base = OTHER; note = 2'-O-methyl modified nucleotide
  modified_base 79: mod_base = OTHER; note = 2'-O-methyl modified nucleotide
  modified_base 80: mod_base = OTHER; note = 2'-O-methyl modified nucleotide
  modified_base 81: mod_base = OTHER; note = 2'-O-methyl modified nucleotide
  modified_base 82: mod_base = OTHER; note = 2'-O-methyl modified nucleotide
  modified_base 83: mod_base = OTHER; note = 2'-O-methyl modified nucleotide
  modified_base 84: mod_base = OTHER; note = 2'-O-methyl modified nucleotide
  modified_base 85: mod_base = OTHER; note = 2'-O-methyl modified nucleotide
  modified_base 86: mod_base = OTHER; note = 2'-O-methyl modified nucleotide
  modified_base 87: mod_base = OTHER; note = 2'-O-methyl modified nucleotide
  modified_base 88: mod_base = OTHER; note = 2'-O-methyl modified nucleotide
  modified_base 89: mod_base = OTHER; note = 2'-O-methyl modified nucleotide
  modified_base 90: mod_base = OTHER; note = 2'-O-methyl modified nucleotide
  modified_base 91: mod_base = OTHER; note = 2'-O-methyl modified nucleotide
  modified_base 92: mod_base = OTHER; note = 2'-O-methyl modified nucleotide
  modified_base 93: mod_base = OTHER; note = 2'-O-methyl modified nucleotide
  modified_base 94: mod_base = OTHER; note = 2'-O-methyl modified nucleotide
  modified_base 95: mod_base = OTHER; note = 2'-O-methyl modified nucleotide
  modified_base 96: mod_base = OTHER; note = 2'-O-methyl modified nucleotide
  modified_base 128: mod_base = OTHER; note = Nucleotide with phosphorothioate linkage
  modified_base 129: mod_base = OTHER; note = 2'-O-methyl modified nucleotide with phosphorothioate linkage
  modified_base 130: mod_base = OTHER; note = 2'-O-methyl modified nucleotide with phosphorothioate linkage
  modified_base 131: mod_base = OTHER; note = 2'-O-methyl modified nucleotide
actcacgctggatagcctccgttttagagctagaaatagcaagttaaaataaggctagtccgttatcaacttgaaaaagtggcaccgagtcggtgctctctttctggcctggatgatgggctatccagcgt

SEQ ID NO: 17638 - RNA, 130 nt, synthetic construct
  source 1..130: mol_type = other RNA
  modified_base 1: mod_base = OTHER; note = 2'-O-methyl modified nucleotide with phosphorothioate linkage
  modified_base 2: mod_base = OTHER; note = 2'-O-methyl modified nucleotide with phosphorothioate linkage
  modified_base 3: mod_base = OTHER; note = 2'-O-methyl modified nucleotide with phosphorothioate linkage
  modified_base 29: mod_base = OTHER; note = 2'-O-methyl modified nucleotide
  modified_base 30: mod_base = OTHER; note = 2'-O-methyl modified nucleotide
  modified_base 31: mod_base = OTHER; note = 2'-O-methyl modified nucleotide
  modified_base 32: mod_base = OTHER; note = 2'-O-methyl modified nucleotide
  modified_base 33: mod_base = OTHER; note = 2'-O-methyl modified nucleotide
  modified_base 34: mod_base = OTHER; note = 2'-O-methyl modified nucleotide
  modified_base 35: mod_base = OTHER; note = 2'-O-methyl modified nucleotide
  modified_base 36: mod_base = OTHER; note = 2'-O-methyl modified nucleotide
  modified_base 37: mod_base = OTHER; note = 2'-O-methyl modified nucleotide
  modified_base 38: mod_base = OTHER; note = 2'-O-methyl modified nucleotide
  modified_base 39: mod_base = OTHER; note = 2'-O-methyl modified nucleotide
  modified_base 40: mod_base = OTHER; note = 2'-O-methyl modified nucleotide
  modified_base 69: mod_base = OTHER; note = 2'-O-methyl modified nucleotide
  modified_base 70: mod_base = OTHER; note = 2'-O-methyl modified nucleotide
  modified_base 71: mod_base = OTHER; note = 2'-O-methyl modified nucleotide
  modified_base 72: mod_base = OTHER; note = 2'-O-methyl modified nucleotide
  modified_base 73: mod_base = OTHER; note = 2'-O-methyl modified nucleotide
  modified_base 74: mod_base = OTHER; note = 2'-O-methyl modified nucleotide
  modified_base 75: mod_base = OTHER; note = 2'-O-methyl modified nucleotide
  modified_base 76: mod_base = OTHER; note = 2'-O-methyl modified nucleotide
  modified_base 77: mod_base = OTHER; note = 2'-O-methyl modified nucleotide
  modified_base 78: mod_base = OTHER; note = 2'-O-methyl modified nucleotide
  modified_base 79: mod_base = OTHER; note = 2'-O-methyl modified nucleotide
  modified_base 80: mod_base = OTHER; note = 2'-O-methyl modified nucleotide
  modified_base 81: mod_base = OTHER; note = 2'-O-methyl modified nucleotide
  modified_base 82: mod_base = OTHER; note = 2'-O-methyl modified nucleotide
  modified_base 83: mod_base = OTHER; note = 2'-O-methyl modified nucleotide
  modified_base 84: mod_base = OTHER; note = 2'-O-methyl modified nucleotide
  modified_base 85: mod_base = OTHER; note = 2'-O-methyl modified nucleotide
  modified_base 86: mod_base = OTHER; note = 2'-O-methyl modified nucleotide
  modified_base 87: mod_base = OTHER; note = 2'-O-methyl modified nucleotide
  modified_base 88: mod_base = OTHER; note = 2'-O-methyl modified nucleotide
  modified_base 89: mod_base = OTHER; note = 2'-O-methyl modified nucleotide
  modified_base 90: mod_base = OTHER; note = 2'-O-methyl modified nucleotide
  modified_base 91: mod_base = OTHER; note = 2'-O-methyl modified nucleotide
  modified_base 92: mod_base = OTHER; note = 2'-O-methyl modified nucleotide
  modified_base 93: mod_base = OTHER; note = 2'-O-methyl modified nucleotide
  modified_base 94: mod_base = OTHER; note = 2'-O-methyl modified nucleotide
  modified_base 95: mod_base = OTHER; note = 2'-O-methyl modified nucleotide
  modified_base 96: mod_base = OTHER; note = 2'-O-methyl modified nucleotide
  modified_base 127: mod_base = OTHER; note = Nucleotide with phosphorothioate linkage
  modified_base 128: mod_base = OTHER; note = 2'-O-methyl modified nucleotide with phosphorothioate linkage
  modified_base 129: mod_base = OTHER; note = 2'-O-methyl modified nucleotide with phosphorothioate linkage
  modified_base 130: mod_base = OTHER; note = 2'-O-methyl modified nucleotide
actcacgctggatagcctccgttttagagctagaaatagcaagttaaaataaggctagtccgttatcaacttgaaaaagtggcaccgagtcggtgctctctttctggcctggatgatgggctatccagcg

SEQ ID NO: 17639 - RNA, 129 nt, synthetic construct
  source 1..129: mol_type = other RNA
  modified_base 1: mod_base = OTHER; note = 2'-O-methyl modified nucleotide with phosphorothioate linkage
  modified_base 2: mod_base = OTHER; note = 2'-O-methyl modified nucleotide with phosphorothioate linkage
  modified_base 3: mod_base = OTHER; note = 2'-O-methyl modified nucleotide with phosphorothioate linkage
  modified_base 29: mod_base = OTHER; note = 2'-O-methyl modified nucleotide
  modified_base 30: mod_base = OTHER; note = 2'-O-methyl modified nucleotide
  modified_base 31: mod_base = OTHER; note = 2'-O-methyl modified nucleotide
  modified_base 32: mod_base = OTHER; note = 2'-O-methyl modified nucleotide
  modified_base 33: mod_base = OTHER; note = 2'-O-methyl modified nucleotide
  modified_base 34: mod_base = OTHER; note = 2'-O-methyl modified nucleotide
  modified_base 35: mod_base = OTHER; note = 2'-O-methyl modified nucleotide
  modified_base 36: mod_base = OTHER; note = 2'-O-methyl modified nucleotide
  modified_base 37: mod_base = OTHER; note = 2'-O-methyl modified nucleotide
  modified_base 38: mod_base = OTHER; note = 2'-O-methyl modified nucleotide
  modified_base 39: mod_base = OTHER; note = 2'-O-methyl modified nucleotide
  modified_base 40: mod_base = OTHER; note = 2'-O-methyl modified nucleotide
  modified_base 69: mod_base = OTHER; note = 2'-O-methyl modified nucleotide
  modified_base 70: mod_base = OTHER; note = 2'-O-methyl modified nucleotide
  modified_base 71: mod_base = OTHER; note = 2'-O-methyl modified nucleotide
  modified_base 72: mod_base = OTHER; note = 2'-O-methyl modified nucleotide
  modified_base 73: mod_base = OTHER; note = 2'-O-methyl modified nucleotide
  modified_base 74: mod_base = OTHER; note = 2'-O-methyl modified nucleotide
  modified_base 75: mod_base = OTHER; note = 2'-O-methyl modified nucleotide
  modified_base 76: mod_base = OTHER; note = 2'-O-methyl modified nucleotide
  modified_base 77: mod_base = OTHER; note = 2'-O-methyl modified nucleotide
  modified_base 78: mod_base = OTHER; note = 2'-O-methyl modified nucleotide
  modified_base 79: mod_base = OTHER; note = 2'-O-methyl modified nucleotide
  modified_base 80: mod_base = OTHER; note = 2'-O-methyl modified nucleotide
  modified_base 81: mod_base = OTHER; note = 2'-O-methyl modified nucleotide
  modified_base 82: mod_base = OTHER; note = 2'-O-methyl modified nucleotide
  modified_base 83: mod_base = OTHER; note = 2'-O-methyl modified nucleotide
  modified_base 84: mod_base = OTHER; note = 2'-O-methyl modified nucleotide
  modified_base 85: mod_base = OTHER; note = 2'-O-methyl modified nucleotide
  modified_base 86: mod_base = OTHER; note = 2'-O-methyl modified nucleotide
  modified_base 87: mod_base = OTHER; note = 2'-O-methyl modified nucleotide
  modified_base 88: mod_base = OTHER; note = 2'-O-methyl modified nucleotide
  modified_base 89: mod_base = OTHER; note = 2'-O-methyl modified nucleotide
  modified_base 90: mod_base = OTHER; note = 2'-O-methyl modified nucleotide
  modified_base 91: mod_base = OTHER; note = 2'-O-methyl modified nucleotide
  modified_base 92: mod_base = OTHER; note = 2'-O-methyl modified nucleotide
  modified_base 93: mod_base = OTHER; note = 2'-O-methyl modified nucleotide
  modified_base 94: mod_base = OTHER; note = 2'-O-methyl modified nucleotide
  modified_base 95: mod_base = OTHER; note = 2'-O-methyl modified nucleotide
  modified_base 96: mod_base = OTHER; note = 2'-O-methyl modified nucleotide
  modified_base 126: mod_base = OTHER; note = Nucleotide with phosphorothioate linkage
  modified_base 127: mod_base = OTHER; note = 2'-O-methyl modified nucleotide with phosphorothioate linkage
  modified_base 128: mod_base = OTHER; note = 2'-O-methyl modified nucleotide with phosphorothioate linkage
  modified_base 129: mod_base = OTHER; note = 2'-O-methyl modified nucleotide
actcacgctggatagcctccgttttagagctagaaatagcaagttaaaataaggctagtccgttatcaacttgaaaaagtggcaccgagtcggtgctctctttctggcctggatgatgggctatccagc

SEQ ID NO: 17640 - RNA, 128 nt, synthetic construct
  source 1..128: mol_type = other RNA
  modified_base 1: mod_base = OTHER; note = 2'-O-methyl modified nucleotide with phosphorothioate linkage
  modified_base 2: mod_base = OTHER; note = 2'-O-methyl modified nucleotide with phosphorothioate linkage
  modified_base 3: mod_base = OTHER; note = 2'-O-methyl modified nucleotide with phosphorothioate linkage
  modified_base 29: mod_base = OTHER; note = 2'-O-methyl modified nucleotide
  modified_base 30: mod_base = OTHER; note = 2'-O-methyl modified nucleotide
  modified_base 31: mod_base = OTHER; note = 2'-O-methyl modified nucleotide
  modified_base 32: mod_base = OTHER; note = 2'-O-methyl modified nucleotide
  modified_base 33: mod_base = OTHER; note = 2'-O-methyl modified nucleotide
  modified_base 34: mod_base = OTHER; note = 2'-O-methyl modified nucleotide
  modified_base 35: mod_base = OTHER; note = 2'-O-methyl modified nucleotide
  modified_base 36: mod_base = OTHER; note = 2'-O-methyl modified nucleotide
  modified_base 37: mod_base = OTHER; note = 2'-O-methyl modified nucleotide
  modified_base 38: mod_base = OTHER; note = 2'-O-methyl modified nucleotide
  modified_base 39: mod_base = OTHER; note = 2'-O-methyl modified nucleotide
  modified_base 40: mod_base = OTHER; note = 2'-O-methyl modified nucleotide
  modified_base 69: mod_base = OTHER; note = 2'-O-methyl modified nucleotide
  modified_base 70: mod_base = OTHER; note = 2'-O-methyl modified nucleotide
  modified_base 71: mod_base = OTHER; note = 2'-O-methyl modified nucleotide
  modified_base 72: mod_base = OTHER; note = 2'-O-methyl modified nucleotide
  modified_base 73: mod_base = OTHER; note = 2'-O-methyl modified nucleotide
  modified_base 74: mod_base = OTHER; note = 2'-O-methyl modified nucleotide
  modified_base 75: mod_base = OTHER; note = 2'-O-methyl modified nucleotide
  modified_base 76: mod_base = OTHER; note = 2'-O-methyl modified nucleotide
  modified_base 77: mod_base = OTHER; note = 2'-O-methyl modified nucleotide
  modified_base 78: mod_base = OTHER; note = 2'-O-methyl modified nucleotide
  modified_base 79: mod_base = OTHER; note = 2'-O-methyl modified nucleotide
  modified_base 80: mod_base = OTHER; note = 2'-O-methyl modified nucleotide
  modified_base 81: mod_base = OTHER; note = 2'-O-methyl modified nucleotide
  modified_base 82: mod_base = OTHER; note = 2'-O-methyl modified nucleotide
  modified_base 83: mod_base = OTHER; note = 2'-O-methyl modified nucleotide
  modified_base 84: mod_base = OTHER; note = 2'-O-methyl modified nucleotide
  modified_base 85: mod_base = OTHER; note = 2'-O-methyl modified nucleotide
  modified_base 86: mod_base = OTHER; note = 2'-O-methyl modified nucleotide
  modified_base 87: mod_base = OTHER; note = 2'-O-methyl modified nucleotide
  modified_base 88: mod_base = OTHER; note = 2'-O-methyl modified nucleotide
  modified_base 89: mod_base = OTHER; note = 2'-O-methyl modified nucleotide
  modified_base 90: mod_base = OTHER; note = 2'-O-methyl modified nucleotide
  modified_base 91: mod_base = OTHER; note = 2'-O-methyl modified nucleotide
  modified_base 92: mod_base = OTHER; note = 2'-O-methyl modified nucleotide
  modified_base 93: mod_base = OTHER; note = 2'-O-methyl modified nucleotide
  modified_base 94: mod_base = OTHER; note = 2'-O-methyl modified nucleotide
  modified_base 95: mod_base = OTHER; note = 2'-O-methyl modified nucleotide
  modified_base 96: mod_base = OTHER; note = 2'-O-methyl modified nucleotide
  modified_base 125: mod_base = OTHER; note = Nucleotide with phosphorothioate linkage
  modified_base 126: mod_base = OTHER; note = 2'-O-methyl modified nucleotide with phosphorothioate linkage
  modified_base 127: mod_base = OTHER; note = 2'-O-methyl modified nucleotide with phosphorothioate linkage
  modified_base 128: mod_base = OTHER; note = 2'-O-methyl modified nucleotide
actcacgctggatagcctccgttttagagctagaaatagcaagttaaaataaggctagtccgttatcaacttgaaaaagtggcaccgagtcggtgctctctttctggcctggatgatgggctatccag

SEQ ID NO: 17641 - RNA, 127 nt, synthetic construct
  source 1..127: mol_type = other RNA
  modified_base 1: mod_base = OTHER; note = 2'-O-methyl modified nucleotide with phosphorothioate linkage
  modified_base 2: mod_base = OTHER; note = 2'-O-methyl modified nucleotide with phosphorothioate linkage
  modified_base 3: mod_base = OTHER; note = 2'-O-methyl modified nucleotide with phosphorothioate linkage
  modified_base 29: mod_base = OTHER; note = 2'-O-methyl modified nucleotide
  modified_base 30: mod_base = OTHER; note = 2'-O-methyl modified nucleotide
  modified_base 31: mod_base = OTHER; note = 2'-O-methyl modified nucleotide
  modified_base 32: mod_base = OTHER; note = 2'-O-methyl modified nucleotide
  modified_base 33: mod_base = OTHER; note = 2'-O-methyl modified nucleotide
  modified_base 34: mod_base = OTHER; note = 2'-O-methyl modified nucleotide
  modified_base 35: mod_base = OTHER; note = 2'-O-methyl modified nucleotide
  modified_base 36: mod_base = OTHER; note = 2'-O-methyl modified nucleotide
  modified_base 37: mod_base = OTHER; note = 2'-O-methyl modified nucleotide
  modified_base 38: mod_base = OTHER; note = 2'-O-methyl modified nucleotide
  modified_base 39: mod_base = OTHER; note = 2'-O-methyl modified nucleotide
  modified_base 40: mod_base = OTHER; note = 2'-O-methyl modified nucleotide
  modified_base 69: mod_base = OTHER; note = 2'-O-methyl modified nucleotide
  modified_base 70: mod_base = OTHER; note = 2'-O-methyl modified nucleotide
  modified_base 71: mod_base = OTHER; note = 2'-O-methyl modified nucleotide
  modified_base 72: mod_base = OTHER; note = 2'-O-methyl modified nucleotide
  modified_base 73: mod_base = OTHER; note = 2'-O-methyl modified nucleotide
  modified_base 74: mod_base = OTHER; note = 2'-O-methyl modified nucleotide
  modified_base 75: mod_base = OTHER; note = 2'-O-methyl modified nucleotide
  modified_base 76: mod_base = OTHER; note = 2'-O-methyl modified nucleotide
  modified_base 77: mod_base = OTHER; note = 2'-O-methyl modified nucleotide
  modified_base 78: mod_base = OTHER; note = 2'-O-methyl modified nucleotide
  modified_base 79: mod_base = OTHER; note = 2'-O-methyl modified nucleotide
  modified_base 80: mod_base = OTHER; note = 2'-O-methyl modified nucleotide
  modified_base 81: mod_base = OTHER; note = 2'-O-methyl modified nucleotide
  modified_base 82: mod_base = OTHER; note = 2'-O-methyl modified nucleotide
  modified_base 83: mod_base = OTHER; note = 2'-O-methyl modified nucleotide
  modified_base 84: mod_base = OTHER; note = 2'-O-methyl modified nucleotide
  modified_base 85: mod_base = OTHER; note = 2'-O-methyl modified nucleotide
  modified_base 86: mod_base = OTHER; note = 2'-O-methyl modified nucleotide
  modified_base 87: mod_base = OTHER; note = 2'-O-methyl modified nucleotide
  modified_base 88: mod_base = OTHER; note = 2'-O-methyl modified nucleotide
  modified_base 89: mod_base = OTHER; note = 2'-O-methyl modified nucleotide
  modified_base 90: mod_base = OTHER; note = 2'-O-methyl modified nucleotide
  modified_base 91: mod_base = OTHER; note = 2'-O-methyl modified nucleotide
  modified_base 92: mod_base = OTHER; note = 2'-O-methyl modified nucleotide
  modified_base 93: mod_base = OTHER; note = 2'-O-methyl modified nucleotide
  modified_base 94: mod_base = OTHER; note = 2'-O-methyl modified nucleotide
  modified_base 95: mod_base = OTHER; note = 2'-O-methyl modified nucleotide
  modified_base 96: mod_base = OTHER; note = 2'-O-methyl modified nucleotide
  modified_base 124: mod_base = OTHER; note = Nucleotide with phosphorothioate linkage
  modified_base 125: mod_base = OTHER; note = 2'-O-methyl modified nucleotide with phosphorothioate linkage
  modified_base 126: mod_base = OTHER; note = 2'-O-methyl modified nucleotide with phosphorothioate linkage
  modified_base 127: mod_base = OTHER; note = 2'-O-methyl modified nucleotide
actcacgctggatagcctccgttttagagctagaaatagcaagttaaaataaggctagtccgttatcaacttgaaaaagtggcaccgagtcggtgctctctttctggcctggatgatgggctatcca

SEQ ID NO: 17642 - RNA, 126 nt, synthetic construct
  source 1..126: mol_type = other RNA
  modified_base 1: mod_base = OTHER; note = 2'-O-methyl modified nucleotide with phosphorothioate linkage
  modified_base 2: mod_base = OTHER; note = 2'-O-methyl modified nucleotide with phosphorothioate linkage
  modified_base 3: mod_base = OTHER; note = 2'-O-methyl modified nucleotide with phosphorothioate linkage
  modified_base 29: mod_base = OTHER; note = 2'-O-methyl modified nucleotide
  modified_base 30: mod_base = OTHER; note = 2'-O-methyl modified nucleotide
  modified_base 31: mod_base = OTHER; note = 2'-O-methyl modified nucleotide
  modified_base 32: mod_base = OTHER; note = 2'-O-methyl modified nucleotide
  modified_base 33: mod_base = OTHER; note = 2'-O-methyl modified nucleotide
  modified_base 34: mod_base = OTHER; note = 2'-O-methyl modified nucleotide
  modified_base 35: mod_base = OTHER; note = 2'-O-methyl modified nucleotide
  modified_base 36: mod_base = OTHER; note = 2'-O-methyl modified nucleotide
  modified_base 37: mod_base = OTHER; note = 2'-O-methyl modified nucleotide
  modified_base 38: mod_base = OTHER; note = 2'-O-methyl modified nucleotide
  modified_base 39: mod_base = OTHER; note = 2'-O-methyl modified nucleotide
  modified_base 40: mod_base = OTHER; note = 2'-O-methyl modified nucleotide
  modified_base 69: mod_base = OTHER; note = 2'-O-methyl modified nucleotide
  modified_base 70: mod_base = OTHER; note = 2'-O-methyl modified nucleotide
  modified_base 71: mod_base = OTHER; note = 2'-O-methyl modified nucleotide
  modified_base 72: mod_base = OTHER; note = 2'-O-methyl modified nucleotide
  modified_base 73: mod_base = OTHER; note = 2'-O-methyl modified nucleotide
  modified_base 74: mod_base = OTHER; note = 2'-O-methyl modified nucleotide
  modified_base 75: mod_base = OTHER; note = 2'-O-methyl modified nucleotide
  modified_base 76: mod_base = OTHER; note = 2'-O-methyl modified nucleotide
  modified_base 77: mod_base = OTHER; note = 2'-O-methyl modified nucleotide
  modified_base 78: mod_base = OTHER; note = 2'-O-methyl modified nucleotide
  modified_base 79: mod_base = OTHER; note = 2'-O-methyl modified nucleotide
  modified_base 80: mod_base = OTHER; note = 2'-O-methyl modified nucleotide
  modified_base 81: mod_base = OTHER; note = 2'-O-methyl modified nucleotide
  modified_base 82: mod_base = OTHER; note = 2'-O-methyl modified nucleotide
  modified_base 83: mod_base = OTHER; note = 2'-O-methyl modified nucleotide
  modified_base 84: mod_base = OTHER; note = 2'-O-methyl modified nucleotide
  modified_base 85: mod_base = OTHER; note = 2'-O-methyl modified nucleotide
  modified_base 86: mod_base = OTHER; note = 2'-O-methyl modified nucleotide
  modified_base 87: mod_base = OTHER; note = 2'-O-methyl modified nucleotide
  modified_base 88: mod_base = OTHER; note = 2'-O-methyl modified nucleotide
  modified_base 89: mod_base = OTHER; note = 2'-O-methyl modified nucleotide
  modified_base 90: mod_base = OTHER; note = 2'-O-methyl modified nucleotide
  modified_base 91: mod_base = OTHER; note = 2'-O-methyl modified nucleotide
  modified_base 92: mod_base = OTHER; note = 2'-O-methyl modified nucleotide
  modified_base 93: mod_base = OTHER; note = 2'-O-methyl modified nucleotide
  modified_base 94: mod_base = OTHER; note = 2'-O-methyl modified nucleotide
  modified_base 95: mod_base = OTHER; note = 2'-O-methyl modified nucleotide
  modified_base 96: mod_base = OTHER; note = 2'-O-methyl modified nucleotide
  modified_base 123: mod_base = OTHER; note = Nucleotide with phosphorothioate linkage
  modified_base 124: mod_base = OTHER; note = 2'-O-methyl modified nucleotide with phosphorothioate linkage
  modified_base 125: mod_base = OTHER; note = 2'-O-methyl modified nucleotide with phosphorothioate linkage
  modified_base 126: mod_base = OTHER; note = 2'-O-methyl modified nucleotide
actcacgctggatagcctccgttttagagctagaaatagcaagttaaaataaggctagtccgttatcaacttgaaaaagtggcaccgagtcggtgctctctttctggcctggatgatgggctatcc

SEQ ID NO: 17643 - RNA, 133 nt, synthetic construct
  source 1..133: mol_type = other RNA
  modified_base 1: mod_base = OTHER; note = 2'-O-methyl modified nucleotide with phosphorothioate linkage
  modified_base 2: mod_base = OTHER; note = 2'-O-methyl modified nucleotide with phosphorothioate linkage
  modified_base 3: mod_base = OTHER; note = 2'-O-methyl modified nucleotide with phosphorothioate linkage
  modified_base 29: mod_base = OTHER; note = 2'-O-methyl modified nucleotide
  modified_base 30: mod_base = OTHER; note = 2'-O-methyl modified nucleotide
  modified_base 31: mod_base = OTHER; note = 2'-O-methyl modified nucleotide
  modified_base 32: mod_base = OTHER; note = 2'-O-methyl modified nucleotide
  modified_base 33: mod_base = OTHER; note = 2'-O-methyl modified nucleotide
  modified_base 34: mod_base = OTHER; note = 2'-O-methyl modified nucleotide
  modified_base 35: mod_base = OTHER; note = 2'-O-methyl modified nucleotide
  modified_base 36: mod_base = OTHER; note = 2'-O-methyl modified nucleotide
  modified_base 37: mod_base = OTHER; note = 2'-O-methyl modified nucleotide
  modified_base 38: mod_base = OTHER; note = 2'-O-methyl modified nucleotide
  modified_base 39: mod_base = OTHER; note = 2'-O-methyl modified nucleotide
  modified_base 40: mod_base = OTHER; note = 2'-O-methyl modified nucleotide
  modified_base 69: mod_base = OTHER; note = 2'-O-methyl modified nucleotide
  modified_base 70: mod_base = OTHER; note = 2'-O-methyl modified nucleotide
  modified_base 71: mod_base = OTHER; note = 2'-O-methyl modified nucleotide
  modified_base 72: mod_base = OTHER; note = 2'-O-methyl modified nucleotide
  modified_base 73: mod_base = OTHER; note = 2'-O-methyl modified nucleotide
  modified_base 74: mod_base = OTHER; note = 2'-O-methyl modified nucleotide
  modified_base 75: mod_base = OTHER; note = 2'-O-methyl modified nucleotide
  modified_base 76: mod_base = OTHER; note = 2'-O-methyl modified nucleotide
  modified_base 77: mod_base = OTHER; note = 2'-O-methyl modified nucleotide
  modified_base 78: mod_base = OTHER; note = 2'-O-methyl modified nucleotide
  modified_base 79: mod_base = OTHER; note = 2'-O-methyl modified nucleotide
  modified_base 80: mod_base = OTHER; note = 2'-O-methyl modified nucleotide
  modified_base 81: mod_base = OTHER; note = 2'-O-methyl modified nucleotide
  modified_base 82: mod_base = OTHER; note = 2'-O-methyl modified nucleotide
  modified_base 83: mod_base = OTHER; note = 2'-O-methyl modified nucleotide
  modified_base 84: mod_base = OTHER; note = 2'-O-methyl modified nucleotide
  modified_base 85: mod_base = OTHER; note = 2'-O-methyl modified nucleotide
  modified_base 86: mod_base = OTHER; note = 2'-O-methyl modified nucleotide
  modified_base 87: mod_base = OTHER; note = 2'-O-methyl modified nucleotide
  modified_base 88: mod_base = OTHER; note = 2'-O-methyl modified nucleotide
  modified_base 89: mod_base = OTHER; note = 2'-O-methyl modified nucleotide
  modified_base 90: mod_base = OTHER; note = 2'-O-methyl modified nucleotide
  modified_base 91: mod_base = OTHER; note = 2'-O-methyl modified nucleotide
  modified_base 92: mod_base = OTHER; note = 2'-O-methyl modified nucleotide
  modified_base 93: mod_base = OTHER; note = 2'-O-methyl modified nucleotide
  modified_base 94: mod_base = OTHER; note = 2'-O-methyl modified nucleotide
  modified_base 95: mod_base = OTHER; note = 2'-O-methyl modified nucleotide
  modified_base 96: mod_base = OTHER; note = 2'-O-methyl modified nucleotide
  modified_base 130: mod_base = OTHER; note = Nucleotide with phosphorothioate linkage
  modified_base 131: mod_base = OTHER; note = 2'-O-methyl modified nucleotide with phosphorothioate linkage
  modified_base 132: mod_base = OTHER; note = 2'-O-methyl modified nucleotide with phosphorothioate linkage
  modified_base 133: mod_base = OTHER; note = 2'-O-methyl modified nucleotide
actcacgctggatagcctccgttttagagctagaaatagcaagttaaaataaggctagtccgttatcaacttgaaaaagtggcaccgagtcggtgctctctctttctggcctggatgatgggctatccagcgt

SEQ ID NO: 17644 - RNA, 132 nt, synthetic construct
  source 1..132: mol_type = other RNA
  modified_base 1: mod_base = OTHER; note = 2'-O-methyl modified nucleotide with phosphorothioate linkage
  modified_base 2: mod_base = OTHER; note = 2'-O-methyl modified nucleotide with phosphorothioate linkage
  modified_base 3: mod_base = OTHER; note = 2'-O-methyl modified nucleotide with phosphorothioate linkage
  modified_base 29: mod_base = OTHER; note = 2'-O-methyl modified nucleotide
  modified_base 30: mod_base = OTHER; note = 2'-O-methyl modified nucleotide
  modified_base 31: mod_base = OTHER; note = 2'-O-methyl modified nucleotide
  modified_base 32: mod_base = OTHER; note = 2'-O-methyl modified nucleotide
  modified_base 33: mod_base = OTHER; note = 2'-O-methyl modified nucleotide
  modified_base 34: mod_base = OTHER; note = 2'-O-methyl modified nucleotide
  modified_base 35: mod_base = OTHER; note = 2'-O-methyl modified nucleotide
  modified_base 36: mod_base = OTHER; note = 2'-O-methyl modified nucleotide
  modified_base 37: mod_base = OTHER; note = 2'-O-methyl modified nucleotide
  modified_base 38: mod_base = OTHER; note = 2'-O-methyl modified nucleotide
  modified_base 39: mod_base = OTHER; note = 2'-O-methyl modified nucleotide
  modified_base 40: mod_base = OTHER; note = 2'-O-methyl modified nucleotide
  modified_base 69: mod_base = OTHER; note = 2'-O-methyl modified nucleotide
  modified_base 70: mod_base = OTHER; note = 2'-O-methyl modified nucleotide
  modified_base 71: mod_base = OTHER; note = 2'-O-methyl modified nucleotide
  modified_base 72: mod_base = OTHER; note = 2'-O-methyl modified nucleotide
  modified_base 73: mod_base = OTHER; note = 2'-O-methyl modified nucleotide
  modified_base 74: mod_base = OTHER; note = 2'-O-methyl modified nucleotide
  modified_base 75: mod_base = OTHER; note = 2'-O-methyl modified nucleotide
  modified_base 76: mod_base = OTHER; note = 2'-O-methyl modified nucleotide
  modified_base 77: mod_base = OTHER; note = 2'-O-methyl modified nucleotide
  modified_base 78: mod_base = OTHER; note = 2'-O-methyl modified nucleotide
  modified_base 79: mod_base = OTHER; note = 2'-O-methyl modified nucleotide
  modified_base 80: mod_base = OTHER; note = 2'-O-methyl modified nucleotide
  modified_base 81: mod_base = OTHER; note = 2'-O-methyl modified nucleotide
  modified_base 82: mod_base = OTHER; note = 2'-O-methyl modified nucleotide
  modified_base 83: mod_base = OTHER; note = 2'-O-methyl modified nucleotide
  modified_base 84: mod_base = OTHER; note = 2'-O-methyl modified nucleotide
  modified_base 85: mod_base = OTHER; note = 2'-O-methyl modified nucleotide
  modified_base 86: mod_base = OTHER; note = 2'-O-methyl modified nucleotide
  modified_base 87: mod_base = OTHER; note = 2'-O-methyl modified nucleotide
  modified_base 88: mod_base = OTHER; note = 2'-O-methyl modified nucleotide
  modified_base 89: mod_base = OTHER; note = 2'-O-methyl modified nucleotide
  modified_base 90: mod_base = OTHER; note = 2'-O-methyl modified nucleotide
  modified_base 91: mod_base = OTHER; note = 2'-O-methyl modified nucleotide
  modified_base 92: mod_base = OTHER; note = 2'-O-methyl modified nucleotide
  modified_base 93: mod_base = OTHER; note = 2'-O-methyl modified nucleotide
  modified_base 94: mod_base = OTHER; note = 2'-O-methyl modified nucleotide
  modified_base 95: mod_base = OTHER; note = 2'-O-methyl modified nucleotide
  modified_base 96: mod_base = OTHER; note = 2'-O-methyl modified nucleotide
  modified_base 129: mod_base = OTHER; note = Nucleotide with phosphorothioate linkage
  modified_base 130: mod_base = OTHER; note = 2'-O-methyl modified nucleotide with phosphorothioate linkage
  modified_base 131: mod_base = OTHER; note = 2'-O-methyl modified nucleotide with phosphorothioate linkage
  modified_base 132: mod_base = OTHER; note = 2'-O-methyl modified nucleotide
actcacgctggatagcctccgttttagagctagaaatagcaagttaaaataaggctagtccgttatcaacttgaaaaagtggcaccgagtcggtgctctctctttctggcctggatgatgggctatccagcg

SEQ ID NO: 17645 - RNA, 131 nt, synthetic construct
  source 1..131: mol_type = other RNA
  modified_base 1: mod_base = OTHER; note = 2'-O-methyl modified nucleotide with phosphorothioate linkage
  modified_base 2: mod_base = OTHER; note = 2'-O-methyl modified nucleotide with phosphorothioate linkage
  modified_base 3: mod_base = OTHER; note = 2'-O-methyl modified nucleotide with phosphorothioate linkage
  modified_base 29: mod_base = OTHER; note = 2'-O-methyl modified nucleotide
  modified_base 30: mod_base = OTHER; note = 2'-O-methyl modified nucleotide
  modified_base 31: mod_base = OTHER; note = 2'-O-methyl modified nucleotide
  modified_base 32: mod_base = OTHER; note = 2'-O-methyl modified nucleotide
  modified_base 33: mod_base = OTHER; note = 2'-O-methyl modified nucleotide
  modified_base 34: mod_base = OTHER; note = 2'-O-methyl modified nucleotide
  modified_base 35: mod_base = OTHER; note = 2'-O-methyl modified nucleotide
  modified_base 36: mod_base = OTHER; note = 2'-O-methyl modified nucleotide
  modified_base 37: mod_base = OTHER; note = 2'-O-methyl modified nucleotide
  modified_base 38: mod_base = OTHER; note = 2'-O-methyl modified nucleotide
  modified_base 39: mod_base = OTHER; note = 2'-O-methyl modified nucleotide
  modified_base 40: mod_base = OTHER; note = 2'-O-methyl modified nucleotide
  modified_base 69: mod_base = OTHER; note = 2'-O-methyl modified nucleotide
  modified_base 70: mod_base = OTHER; note = 2'-O-methyl modified nucleotide
  modified_base 71: mod_base = OTHER; note = 2'-O-methyl modified nucleotide
  modified_base 72: mod_base = OTHER; note = 2'-O-methyl modified nucleotide
  modified_base 73: mod_base = OTHER; note = 2'-O-methyl modified nucleotide
  modified_base 74: mod_base = OTHER; note = 2'-O-methyl modified nucleotide
  modified_base 75: mod_base = OTHER; note = 2'-O-methyl modified nucleotide
  modified_base 76: mod_base = OTHER; note = 2'-O-methyl modified nucleotide
  modified_base 77: mod_base = OTHER; note = 2'-O-methyl modified nucleotide
  modified_base 78: mod_base = OTHER; note = 2'-O-methyl modified nucleotide
  modified_base 79: mod_base = OTHER; note = 2'-O-methyl modified nucleotide
  modified_base 80: mod_base = OTHER; note = 2'-O-methyl modified nucleotide
  modified_base 81: mod_base = OTHER; note = 2'-O-methyl modified nucleotide
  modified_base 82: mod_base = OTHER; note = 2'-O-methyl modified nucleotide
  modified_base 83: mod_base = OTHER; note = 2'-O-methyl modified nucleotide
  modified_base 84: mod_base = OTHER; note = 2'-O-methyl modified nucleotide
  modified_base 85: mod_base = OTHER; note = 2'-O-methyl modified nucleotide
  modified_base 86: mod_base = OTHER; note = 2'-O-methyl modified nucleotide
  modified_base 87: mod_base = OTHER; note = 2'-O-methyl modified nucleotide
  modified_base 88: mod_base = OTHER; note = 2'-O-methyl modified nucleotide
  modified_base 89: mod_base = OTHER; note = 2'-O-methyl modified nucleotide
  modified_base 90: mod_base = OTHER; note = 2'-O-methyl modified nucleotide
  modified_base 91: mod_base = OTHER; note = 2'-O-methyl modified nucleotide
  modified_base 92: mod_base = OTHER; note = 2'-O-methyl modified nucleotide
  modified_base 93: mod_base = OTHER; note = 2'-O-methyl modified nucleotide
  modified_base 94: mod_base = OTHER; note = 2'-O-methyl modified nucleotide
  modified_base 95: mod_base = OTHER; note = 2'-O-methyl modified nucleotide
  modified_base 96: mod_base = OTHER; note = 2'-O-methyl modified nucleotide
  modified_base 128: mod_base = OTHER; note = Nucleotide with phosphorothioate linkage
  modified_base 129: mod_base = OTHER; note = 2'-O-methyl modified nucleotide with phosphorothioate linkage
  modified_base 130: mod_base = OTHER; note = 2'-O-methyl modified nucleotide with phosphorothioate linkage
  modified_base 131: mod_base = OTHER; note = 2'-O-methyl modified nucleotide
actcacgctggatagcctccgttttagagctagaaatagcaagttaaaataaggctagtccgttatcaacttgaaaaagtggcaccgagtcggtgctctctctttctggcctggatgatgggctatccagc

SEQ ID NO: 17646 - RNA, 130 nt, synthetic construct
  source 1..130: mol_type = other RNA
  modified_base 1: mod_base = OTHER; note = 2'-O-methyl modified nucleotide with phosphorothioate linkage
  modified_base 2: mod_base = OTHER; note = 2'-O-methyl modified nucleotide with phosphorothioate linkage
  modified_base 3: mod_base = OTHER; note = 2'-O-methyl modified nucleotide with phosphorothioate linkage
  modified_base 29: mod_base = OTHER; note = 2'-O-methyl modified nucleotide
  modified_base 30: mod_base = OTHER; note = 2'-O-methyl modified nucleotide
  modified_base 31: mod_base = OTHER; note = 2'-O-methyl modified nucleotide
  modified_base 32: mod_base = OTHER; note = 2'-O-methyl modified nucleotide
  modified_base 33: mod_base = OTHER; note = 2'-O-methyl modified nucleotide
  modified_base 34: mod_base = OTHER; note = 2'-O-methyl modified nucleotide
  modified_base 35: mod_base = OTHER; note = 2'-O-methyl modified nucleotide
  modified_base 36: mod_base = OTHER; note = 2'-O-methyl modified nucleotide
  modified_base 37: mod_base = OTHER; note = 2'-O-methyl modified nucleotide
  modified_base 38: mod_base = OTHER; note = 2'-O-methyl modified nucleotide
  modified_base 39: mod_base = OTHER; note = 2'-O-methyl modified nucleotide
  modified_base 40: mod_base = OTHER; note = 2'-O-methyl modified nucleotide
  modified_base 69: mod_base = OTHER; note = 2'-O-methyl modified nucleotide
  modified_base 70: mod_base = OTHER; note = 2'-O-methyl modified nucleotide
  modified_base 71: mod_base = OTHER; note = 2'-O-methyl modified nucleotide
  modified_base 72: mod_base = OTHER; note = 2'-O-methyl modified nucleotide
  modified_base 73: mod_base = OTHER; note = 2'-O-methyl modified nucleotide
  modified_base 74: mod_base = OTHER; note = 2'-O-methyl modified nucleotide
  modified_base 75: mod_base = OTHER; note = 2'-O-methyl modified nucleotide
  modified_base 76: mod_base = OTHER; note = 2'-O-methyl modified nucleotide
  modified_base 77: mod_base = OTHER; note = 2'-O-methyl modified nucleotide
  modified_base 78: mod_base = OTHER; note = 2'-O-methyl modified nucleotide
  modified_base 79: mod_base = OTHER; note = 2'-O-methyl modified nucleotide
  modified_base 80: mod_base = OTHER; note = 2'-O-methyl modified nucleotide
  modified_base 81: mod_base = OTHER; note = 2'-O-methyl modified nucleotide
  modified_base 82: mod_base = OTHER; note = 2'-O-methyl modified nucleotide
  modified_base 83: mod_base = OTHER; note = 2'-O-methyl modified nucleotide
  modified_base 84: mod_base = OTHER; note = 2'-O-methyl modified nucleotide
  modified_base 85: mod_base = OTHER; note = 2'-O-methyl modified nucleotide
  modified_base 86: mod_base = OTHER; note = 2'-O-methyl modified nucleotide
  modified_base 87: mod_base = OTHER; note = 2'-O-methyl modified nucleotide
  modified_base 88: mod_base = OTHER; note = 2'-O-methyl modified nucleotide
  modified_base 89: mod_base = OTHER; note = 2'-O-methyl modified nucleotide
  modified_base 90: mod_base = OTHER; note = 2'-O-methyl modified nucleotide
  modified_base 91: mod_base = OTHER; note = 2'-O-methyl modified nucleotide
  modified_base 92: mod_base = OTHER; note = 2'-O-methyl modified nucleotide
  modified_base 93: mod_base = OTHER; note = 2'-O-methyl modified nucleotide
  modified_base 94: mod_base = OTHER; note = 2'-O-methyl modified nucleotide
  modified_base 95: mod_base = OTHER; note = 2'-O-methyl modified nucleotide
  modified_base 96: mod_base = OTHER; note = 2'-O-methyl modified nucleotide
  modified_base 127: mod_base = OTHER; note = Nucleotide with phosphorothioate linkage
  modified_base 128: mod_base = OTHER; note = 2'-O-methyl modified nucleotide with phosphorothioate linkage
  modified_base 129: mod_base = OTHER; note = 2'-O-methyl modified nucleotide with phosphorothioate linkage
  modified_base 130: mod_base = OTHER; note = 2'-O-methyl modified nucleotide
actcacgctggatagcctccgttttagagctagaaatagcaagttaaaataaggctagtccgttatcaacttgaaaaagtggcaccgagtcggtgctctctctttctggcctggatgatgggctatccag

SEQ ID NO: 17647 - RNA, 129 nt, synthetic construct
  source 1..129: mol_type = other RNA
  modified_base 1: mod_base = OTHER; note = 2'-O-methyl modified nucleotide with phosphorothioate linkage
  modified_base 2: mod_base = OTHER; note = 2'-O-methyl modified nucleotide with phosphorothioate linkage
  modified_base 3: mod_base = OTHER; note = 2'-O-methyl modified nucleotide with phosphorothioate linkage
  modified_base 29: mod_base = OTHER; note = 2'-O-methyl modified nucleotide
  modified_base 30: mod_base = OTHER; note = 2'-O-methyl modified nucleotide
  modified_base 31: mod_base = OTHER; note = 2'-O-methyl modified nucleotide
  modified_base 32: mod_base = OTHER; note = 2'-O-methyl modified nucleotide
  modified_base 33: mod_base = OTHER; note = 2'-O-methyl modified nucleotide
  modified_base 34: mod_base = OTHER; note = 2'-O-methyl modified nucleotide
  modified_base 35: mod_base = OTHER; note = 2'-O-methyl modified nucleotide
  modified_base 36: mod_base = OTHER; note = 2'-O-methyl modified nucleotide
  modified_base 37: mod_base = OTHER; note = 2'-O-methyl modified nucleotide
  modified_base 38: mod_base = OTHER; note = 2'-O-methyl modified nucleotide
  modified_base 39: mod_base = OTHER; note = 2'-O-methyl modified nucleotide
  modified_base 40: mod_base = OTHER; note = 2'-O-methyl modified nucleotide
  modified_base 69: mod_base = OTHER; note = 2'-O-methyl modified nucleotide
  modified_base 70: mod_base = OTHER; note = 2'-O-methyl modified nucleotide
  modified_base 71: mod_base = OTHER; note = 2'-O-methyl modified nucleotide
  modified_base 72: mod_base = OTHER; note = 2'-O-methyl modified nucleotide
  modified_base 73: mod_base = OTHER; note = 2'-O-methyl modified nucleotide
  modified_base 74: mod_base = OTHER; note = 2'-O-methyl modified nucleotide
  modified_base 75: mod_base = OTHER; note = 2'-O-methyl modified nucleotide
  modified_base 76: mod_base = OTHER; note = 2'-O-methyl modified nucleotide
  modified_base 77: mod_base = OTHER; note = 2'-O-methyl modified nucleotide
  modified_base 78: mod_base = OTHER; note = 2'-O-methyl modified nucleotide
  modified_base 79: mod_base = OTHER; note = 2'-O-methyl modified nucleotide
  modified_base 80: mod_base = OTHER; note = 2'-O-methyl modified nucleotide
  modified_base 81: mod_base = OTHER; note = 2'-O-methyl modified nucleotide
  modified_base 82: mod_base = OTHER; note = 2'-O-methyl modified nucleotide
  modified_base 83: mod_base = OTHER; note = 2'-O-methyl modified nucleotide
  modified_base 84: mod_base = OTHER; note = 2'-O-methyl modified nucleotide
  modified_base 85: mod_base = OTHER; note = 2'-O-methyl modified nucleotide
  modified_base 86: mod_base = OTHER; note = 2'-O-methyl modified nucleotide
  modified_base 87: mod_base = OTHER; note = 2'-O-methyl modified nucleotide
  modified_base 88: mod_base = OTHER; note = 2'-O-methyl modified nucleotide
  modified_base 89: mod_base = OTHER; note = 2'-O-methyl modified nucleotide
  modified_base 90: mod_base = OTHER; note = 2'-O-methyl modified nucleotide
  modified_base 91: mod_base = OTHER; note = 2'-O-methyl modified nucleotide
  modified_base 92: mod_base = OTHER; note = 2'-O-methyl modified nucleotide
  modified_base 93: mod_base = OTHER; note = 2'-O-methyl modified nucleotide
  modified_base 94: mod_base = OTHER; note = 2'-O-methyl modified nucleotide
  modified_base 95: mod_base = OTHER; note = 2'-O-methyl modified nucleotide
  modified_base 96: mod_base = OTHER; note = 2'-O-methyl modified nucleotide
  modified_base 126: mod_base = OTHER; note = Nucleotide with phosphorothioate linkage
  modified_base 127: mod_base = OTHER; note = 2'-O-methyl modified nucleotide with phosphorothioate linkage
  modified_base 128: mod_base = OTHER; note = 2'-O-methyl modified nucleotide with phosphorothioate linkage
  modified_base 129: mod_base = OTHER; note = 2'-O-methyl modified nucleotide
actcacgctggatagcctccgttttagagctagaaatagcaagttaaaataaggctagtccgttatcaacttgaaaaagtggcaccgagtcggtgctctctctttctggcctggatgatgggctatcca

SEQ ID NO: 17648 - RNA, 128 nt, synthetic construct
  source 1..128: mol_type = other RNA
  modified_base 1: mod_base = OTHER; note = 2'-O-methyl modified nucleotide with phosphorothioate linkage
  modified_base 2: mod_base = OTHER; note = 2'-O-methyl modified nucleotide with phosphorothioate linkage
  modified_base 3: mod_base = OTHER; note = 2'-O-methyl modified nucleotide with phosphorothioate linkage
  modified_base 29: mod_base = OTHER; note = 2'-O-methyl modified nucleotide
  modified_base 30: mod_base = OTHER; note = 2'-O-methyl modified nucleotide
  modified_base 31: mod_base = OTHER; note = 2'-O-methyl modified nucleotide
  modified_base 32: mod_base = OTHER; note = 2'-O-methyl modified nucleotide
  modified_base 33: mod_base = OTHER; note = 2'-O-methyl modified nucleotide
  modified_base 34: mod_base = OTHER; note = 2'-O-methyl modified nucleotide
  modified_base 35: mod_base = OTHER; note = 2'-O-methyl modified nucleotide
  modified_base 36: mod_base = OTHER; note = 2'-O-methyl modified nucleotide
  modified_base 37: mod_base = OTHER; note = 2'-O-methyl modified nucleotide
  modified_base 38: mod_base = OTHER; note = 2'-O-methyl modified nucleotide
  modified_base 39: mod_base = OTHER; note = 2'-O-methyl modified nucleotide
  modified_base 40: mod_base = OTHER; note = 2'-O-methyl modified nucleotide
  modified_base 69: mod_base = OTHER; note = 2'-O-methyl modified nucleotide
  modified_base 70: mod_base = OTHER; note = 2'-O-methyl modified nucleotide
  modified_base 71: mod_base = OTHER; note = 2'-O-methyl modified nucleotide
  modified_base 72: mod_base = OTHER; note = 2'-O-methyl modified nucleotide
  modified_base 73: mod_base = OTHER; note = 2'-O-methyl modified nucleotide
  modified_base 74: mod_base = OTHER; note = 2'-O-methyl modified nucleotide
  modified_base 75: mod_base = OTHER; note = 2'-O-methyl modified nucleotide
  modified_base 76: mod_base = OTHER; note = 2'-O-methyl modified nucleotide
  modified_base 77: mod_base = OTHER; note = 2'-O-methyl modified nucleotide
  modified_base 78: mod_base = OTHER; note = 2'-O-methyl modified nucleotide
  modified_base 79: mod_base = OTHER; note = 2'-O-methyl modified nucleotide
  modified_base 80: mod_base = OTHER; note = 2'-O-methyl modified nucleotide
  modified_base 81: mod_base = OTHER; note = 2'-O-methyl modified nucleotide
  modified_base 82: mod_base = OTHER; note = 2'-O-methyl modified nucleotide
  modified_base 83: mod_base = OTHER; note = 2'-O-methyl modified nucleotide
  modified_base 84: mod_base = OTHER; note = 2'-O-methyl modified nucleotide
  modified_base 85: mod_base = OTHER; note = 2'-O-methyl modified nucleotide
  modified_base 86: mod_base = OTHER; note = 2'-O-methyl modified nucleotide
  modified_base 87: mod_base = OTHER; note = 2'-O-methyl modified nucleotide
  modified_base 88: mod_base = OTHER; note = 2'-O-methyl modified nucleotide
  modified_base 89: mod_base = OTHER; note = 2'-O-methyl modified nucleotide
  modified_base 90: mod_base = OTHER; note = 2'-O-methyl modified nucleotide
  modified_base 91: mod_base = OTHER; note = 2'-O-methyl modified nucleotide
  modified_base 92: mod_base = OTHER; note = 2'-O-methyl modified nucleotide
  modified_base 93: mod_base = OTHER; note = 2'-O-methyl modified nucleotide
  modified_base 94: mod_base = OTHER; note = 2'-O-methyl modified nucleotide
  modified_base 95: mod_base = OTHER; note = 2'-O-methyl modified nucleotide
  modified_base 96: mod_base = OTHER; note = 2'-O-methyl modified nucleotide
  modified_base 125: mod_base = OTHER; note = Nucleotide with phosphorothioate linkage
  modified_base 126: mod_base = OTHER; note = 2'-O-methyl modified nucleotide with phosphorothioate linkage
  modified_base 127: mod_base = OTHER; note = 2'-O-methyl modified nucleotide with phosphorothioate linkage
  modified_base 128: mod_base = OTHER; note = 2'-O-methyl modified nucleotide
actcacgctggatagcctccgttttagagctagaaatagcaagttaaaataaggctagtccgttatcaacttgaaaaagtggcaccgagtcggtgctctctctttctggcctggatgatgggctatcc

SEQ ID NO: 17649 - RNA, 121 nt, synthetic construct
  source 1..121: mol_type = other RNA
  modified_base 1: mod_base = OTHER; note = 2'-O-methyl modified nucleotide with phosphorothioate linkage
  modified_base 2: mod_base = OTHER; note = 2'-O-methyl modified nucleotide with phosphorothioate linkage
  modified_base 3: mod_base = OTHER; note = 2'-O-methyl modified nucleotide with phosphorothioate linkage
  modified_base 29: mod_base = OTHER; note = 2'-O-methyl modified nucleotide
  modified_base 30: mod_base = OTHER; note = 2'-O-methyl modified nucleotide
  modified_base 31: mod_base = OTHER; note = 2'-O-methyl modified nucleotide
  modified_base 32: mod_base = OTHER; note = 2'-O-methyl modified nucleotide
  modified_base 33: mod_base = OTHER; note = 2'-O-methyl modified nucleotide
  modified_base 34: mod_base = OTHER; note = 2'-O-methyl modified nucleotide
  modified_base 35: mod_base = OTHER; note = 2'-O-methyl modified nucleotide
  modified_base 36: mod_base = OTHER; note = 2'-O-methyl modified nucleotide
  modified_base 37: mod_base = OTHER; note = 2'-O-methyl modified nucleotide
  modified_base 38: mod_base = OTHER; note = 2'-O-methyl modified nucleotide
  modified_base 39: mod_base = OTHER; note = 2'-O-methyl modified nucleotide
  modified_base 40: mod_base = OTHER; note = 2'-O-methyl modified nucleotide
  modified_base 69: mod_base = OTHER; note = 2'-O-methyl modified nucleotide
  modified_base 70: mod_base = OTHER; note = 2'-O-methyl modified nucleotide
  modified_base 71: mod_base = OTHER; note = 2'-O-methyl modified nucleotide
  modified_base 72: mod_base = OTHER; note = 2'-O-methyl modified nucleotide
  modified_base 73: mod_base = OTHER; note = 2'-O-methyl modified nucleotide
  modified_base 74: mod_base = OTHER; note = 2'-O-methyl modified nucleotide
  modified_base 75: mod_base = OTHER; note = 2'-O-methyl modified nucleotide
  modified_base 76: mod_base = OTHER; note = 2'-O-methyl modified nucleotide
  modified_base 77: mod_base = OTHER; note = 2'-O-methyl modified nucleotide
  modified_base 78: mod_base = OTHER; note = 2'-O-methyl modified nucleotide
  modified_base 79: mod_base = OTHER; note = 2'-O-methyl modified nucleotide
  modified_base 80: mod_base = OTHER; note = 2'-O-methyl modified nucleotide
  modified_base 81: mod_base = OTHER; note = 2'-O-methyl modified nucleotide
  modified_base 82: mod_base = OTHER; note = 2'-O-methyl modified nucleotide
  modified_base 83: mod_base = OTHER; note = 2'-O-methyl modified nucleotide
  modified_base 84: mod_base = OTHER; note = 2'-O-methyl modified nucleotide
  modified_base 85: mod_base = OTHER; note = 2'-O-methyl modified nucleotide
  modified_base 86: mod_base = OTHER; note = 2'-O-methyl modified nucleotide
  modified_base 87: mod_base = OTHER; note = 2'-O-methyl modified nucleotide
  modified_base 88: mod_base = OTHER; note = 2'-O-methyl modified nucleotide
  modified_base 89: mod_base = OTHER; note = 2'-O-methyl modified nucleotide
  modified_base 90: mod_base = OTHER; note = 2'-O-methyl modified nucleotide
  modified_base 91: mod_base = OTHER; note = 2'-O-methyl modified nucleotide
  modified_base 92: mod_base = OTHER; note = 2'-O-methyl modified nucleotide
  modified_base 93: mod_base = OTHER; note = 2'-O-methyl modified nucleotide
  modified_base 94: mod_base = OTHER; note = 2'-O-methyl modified nucleotide
  modified_base 95: mod_base = OTHER; note = 2'-O-methyl modified nucleotide
  modified_base 96: mod_base = OTHER; note = 2'-O-methyl modified nucleotide
  modified_base 118: mod_base = OTHER; note = Nucleotide with phosphorothioate linkage
  modified_base 119: mod_base = OTHER; note = 2'-O-methyl modified nucleotide with phosphorothioate linkage
  modified_base 120: mod_base = OTHER; note = 2'-O-methyl modified nucleotide with phosphorothioate linkage
  modified_base 121: mod_base = OTHER; note = 2'-O-methyl modified nucleotide
actcacgctggatagcctccgttttagagctagaaatagcaagttaaaataaggctagtccgttatcaacttgaaaaagtggcaccgagtcggtgcgcctggataaccggctatccagcgt

SEQ ID NO: 17650 - RNA, 120 nt, synthetic construct
  source 1..120: mol_type = other RNA
  modified_base 1: mod_base = OTHER; note = 2'-O-methyl modified nucleotide with phosphorothioate linkage
  modified_base 2: mod_base = OTHER; note = 2'-O-methyl modified nucleotide with phosphorothioate linkage
  modified_base 3: mod_base = OTHER; note = 2'-O-methyl modified nucleotide with phosphorothioate linkage
  modified_base 29: mod_base = OTHER; note = 2'-O-methyl modified nucleotide
  modified_base 30: mod_base = OTHER; note = 2'-O-methyl modified nucleotide
  modified_base 31: mod_base = OTHER; note = 2'-O-methyl modified nucleotide
  modified_base 32: mod_base = OTHER; note = 2'-O-methyl modified nucleotide
  modified_base 33: mod_base = OTHER; note = 2'-O-methyl modified nucleotide
  modified_base 34: mod_base = OTHER; note = 2'-O-methyl modified nucleotide
  modified_base 35: mod_base = OTHER; note = 2'-O-methyl modified nucleotide
  modified_base 36: mod_base = OTHER; note = 2'-O-methyl modified nucleotide
  modified_base 37: mod_base = OTHER; note = 2'-O-methyl modified nucleotide
  modified_base 38: mod_base = OTHER; note = 2'-O-methyl modified nucleotide
  modified_base 39: mod_base = OTHER; note = 2'-O-methyl modified nucleotide
  modified_base 40: mod_base = OTHER; note = 2'-O-methyl modified nucleotide
  modified_base 69: mod_base = OTHER; note = 2'-O-methyl modified nucleotide
  modified_base 70: mod_base = OTHER; note = 2'-O-methyl modified nucleotide
  modified_base 71: mod_base = OTHER; note = 2'-O-methyl modified nucleotide
  modified_base 72: mod_base = OTHER; note = 2'-O-methyl modified nucleotide
  modified_base 73: mod_base = OTHER; note = 2'-O-methyl modified nucleotide
  modified_base 74: mod_base = OTHER; note = 2'-O-methyl modified nucleotide
  modified_base 75: mod_base = OTHER; note = 2'-O-methyl modified nucleotide
  modified_base 76: mod_base = OTHER; note = 2'-O-methyl modified nucleotide
  modified_base 77: mod_base = OTHER; note = 2'-O-methyl modified nucleotide
  modified_base 78: mod_base = OTHER; note = 2'-O-methyl modified nucleotide
  modified_base 79: mod_base = OTHER; note = 2'-O-methyl modified nucleotide
  modified_base 80: mod_base = OTHER; note = 2'-O-methyl modified nucleotide
  modified_base 81: mod_base = OTHER; note = 2'-O-methyl modified nucleotide
  modified_base 82: mod_base = OTHER; note = 2'-O-methyl modified nucleotide
  modified_base 83: mod_base = OTHER; note = 2'-O-methyl modified nucleotide
  modified_base 84: mod_base = OTHER; note = 2'-O-methyl modified nucleotide
  modified_base 85: mod_base = OTHER; note = 2'-O-methyl modified nucleotide
  modified_base 86: mod_base = OTHER; note = 2'-O-methyl modified nucleotide
  modified_base 87: mod_base = OTHER; note = 2'-O-methyl modified nucleotide
  modified_base 88: mod_base = OTHER; note = 2'-O-methyl modified nucleotide
  modified_base 89: mod_base = OTHER; note = 2'-O-methyl modified nucleotide
  modified_base 90: mod_base = OTHER; note = 2'-O-methyl modified nucleotide
  modified_base 91: mod_base = OTHER; note = 2'-O-methyl modified nucleotide
  modified_base 92: mod_base = OTHER; note = 2'-O-methyl modified nucleotide
  modified_base 93: mod_base = OTHER; note = 2'-O-methyl modified nucleotide
  modified_base 94: mod_base = OTHER; note = 2'-O-methyl modified nucleotide
  modified_base 95: mod_base = OTHER; note = 2'-O-methyl modified nucleotide
  modified_base 96: mod_base = OTHER; note = 2'-O-methyl modified nucleotide
  modified_base 117: mod_base = OTHER; note = Nucleotide with phosphorothioate linkage
  modified_base 118: mod_base = OTHER; note = 2'-O-methyl modified nucleotide with phosphorothioate linkage
  modified_base 119: mod_base = OTHER; note = 2'-O-methyl modified nucleotide with phosphorothioate linkage
  modified_base 120: mod_base = OTHER; note = 2'-O-methyl modified nucleotide
actcacgctggatagcctccgttttagagctagaaatagcaagttaaaataaggctagtccgttatcaacttgaaaaagtggcaccgagtcggtgcgcctggataaccggctatccagcg

SEQ ID NO: 17651 - RNA, 119 nt, synthetic construct
  source 1..119: mol_type = other RNA
  modified_base 1: mod_base = OTHER; note = 2'-O-methyl modified nucleotide with phosphorothioate linkage
  modified_base 2: mod_base = OTHER; note = 2'-O-methyl modified nucleotide with phosphorothioate linkage
  modified_base 3: mod_base = OTHER; note = 2'-O-methyl modified nucleotide with phosphorothioate linkage
  modified_base 29: mod_base = OTHER; note = 2'-O-methyl modified nucleotide
  modified_base 30: mod_base = OTHER; note = 2'-O-methyl modified nucleotide
  modified_base 31: mod_base = OTHER; note = 2'-O-methyl modified nucleotide
  modified_base 32: mod_base = OTHER; note = 2'-O-methyl modified nucleotide
  modified_base 33: mod_base = OTHER; note = 2'-O-methyl modified nucleotide
  modified_base 34: mod_base = OTHER; note = 2'-O-methyl modified nucleotide
  modified_base 35: mod_base = OTHER; note = 2'-O-methyl modified nucleotide
  modified_base 36: mod_base = OTHER; note = 2'-O-methyl modified nucleotide
  modified_base 37: mod_base = OTHER; note = 2'-O-methyl modified nucleotide
  modified_base 38: mod_base = OTHER; note = 2'-O-methyl modified nucleotide
  modified_base 39: mod_base = OTHER; note = 2'-O-methyl modified nucleotide
  modified_base 40: mod_base = OTHER; note = 2'-O-methyl modified nucleotide
  modified_base 69: mod_base = OTHER; note = 2'-O-methyl modified nucleotide
  modified_base 70: mod_base = OTHER; note = 2'-O-methyl modified nucleotide
  modified_base 71: mod_base = OTHER; note = 2'-O-methyl modified nucleotide
  modified_base 72: mod_base = OTHER; note = 2'-O-methyl modified nucleotide
  modified_base 73: mod_base = OTHER; note = 2'-O-methyl modified nucleotide
  modified_base 74: mod_base = OTHER; note = 2'-O-methyl modified nucleotide
  modified_base 75: mod_base = OTHER; note = 2'-O-methyl modified nucleotide
  modified_base 76: mod_base = OTHER; note = 2'-O-methyl modified nucleotide
  modified_base 77: mod_base = OTHER; note = 2'-O-methyl modified nucleotide
  modified_base 78: mod_base = OTHER; note = 2'-O-methyl modified nucleotide
  modified_base 79: mod_base = OTHER; note = 2'-O-methyl modified nucleotide
  modified_base 80: mod_base = OTHER; note = 2'-O-methyl modified nucleotide
  modified_base 81: mod_base = OTHER; note = 2'-O-methyl modified nucleotide
  modified_base 82: mod_base = OTHER; note = 2'-O-methyl modified nucleotide
  modified_base 83: mod_base = OTHER; note = 2'-O-methyl modified nucleotide
  modified_base 84: mod_base = OTHER; note = 2'-O-methyl modified nucleotide
  modified_base 85: mod_base = OTHER; note = 2'-O-methyl modified nucleotide
  modified_base 86: mod_base = OTHER; note = 2'-O-methyl modified nucleotide
  modified_base 87: mod_base = OTHER; note = 2'-O-methyl modified nucleotide
  modified_base 88: mod_base = OTHER; note = 2'-O-methyl modified nucleotide
  modified_base 89: mod_base = OTHER; note = 2'-O-methyl modified nucleotide
  modified_base 90: mod_base = OTHER; note = 2'-O-methyl modified nucleotide
  modified_base 91: mod_base = OTHER; note = 2'-O-methyl modified nucleotide
  modified_base 92: mod_base = OTHER; note = 2'-O-methyl modified nucleotide
  modified_base 93: mod_base = OTHER; note = 2'-O-methyl modified nucleotide
  modified_base 94: mod_base = OTHER; note = 2'-O-methyl modified nucleotide
  modified_base 95: mod_base = OTHER; note = 2'-O-methyl modified nucleotide
  modified_base 96: mod_base = OTHER; note = 2'-O-methyl modified nucleotide
  modified_base 116: mod_base = OTHER; note = Nucleotide with phosphorothioate linkage
  modified_base 117: mod_base = OTHER; note = 2'-O-methyl modified nucleotide with phosphorothioate linkage
  modified_base 118: mod_base = OTHER; note = 2'-O-methyl modified nucleotide with phosphorothioate linkage
  modified_base 119: mod_base = OTHER; note = 2'-O-methyl modified nucleotide
actcacgctggatagcctccgttttagagctagaaatagcaagttaaaataaggctagtccgttatcaacttgaaaaagtggcaccgagtcggtgcgcctggataaccggctatccagc

SEQ ID NO: 17652 - RNA, 118 nt, synthetic construct
  source 1..118: mol_type = other RNA
  modified_base 1: mod_base = OTHER; note = 2'-O-methyl modified nucleotide with phosphorothioate linkage
  modified_base 2: mod_base = OTHER; note = 2'-O-methyl modified nucleotide with phosphorothioate linkage
  modified_base 3: mod_base = OTHER; note = 2'-O-methyl modified nucleotide with phosphorothioate linkage
  modified_base 29: mod_base = OTHER; note = 2'-O-methyl modified nucleotide
  modified_base 30: mod_base = OTHER; note = 2'-O-methyl modified nucleotide
  modified_base 31: mod_base = OTHER; note = 2'-O-methyl modified nucleotide
  modified_base 32: mod_base = OTHER; note = 2'-O-methyl modified nucleotide
  modified_base 33: mod_base = OTHER; note = 2'-O-methyl modified nucleotide
  modified_base 34: mod_base = OTHER; note = 2'-O-methyl modified nucleotide
  modified_base 35: mod_base = OTHER; note = 2'-O-methyl modified nucleotide
  modified_base 36: mod_base = OTHER; note = 2'-O-methyl modified nucleotide
  modified_base 37: mod_base = OTHER; note = 2'-O-methyl modified nucleotide
  modified_base 38: mod_base = OTHER; note = 2'-O-methyl modified nucleotide
  modified_base 39: mod_base = OTHER; note = 2'-O-methyl modified nucleotide
  modified_base 40: mod_base = OTHER; note = 2'-O-methyl modified nucleotide
  modified_base 69: mod_base = OTHER; note = 2'-O-methyl modified nucleotide
  modified_base 70: mod_base = OTHER; note = 2'-O-methyl modified nucleotide
  modified_base 71: mod_base = OTHER; note = 2'-O-methyl modified nucleotide
  modified_base 72: mod_base = OTHER; note = 2'-O-methyl modified nucleotide
  modified_base 73: mod_base = OTHER; note = 2'-O-methyl modified nucleotide
  modified_base 74: mod_base = OTHER; note = 2'-O-methyl modified nucleotide
  modified_base 75: mod_base = OTHER; note = 2'-O-methyl modified nucleotide
  modified_base 76: mod_base = OTHER; note = 2'-O-methyl modified nucleotide
  modified_base 77: mod_base = OTHER; note = 2'-O-methyl modified nucleotide
  modified_base 78: mod_base = OTHER; note = 2'-O-methyl modified nucleotide
  modified_base 79: mod_base = OTHER; note = 2'-O-methyl modified nucleotide
  modified_base 80: mod_base = OTHER; note = 2'-O-methyl modified nucleotide
  modified_base 81: mod_base = OTHER; note = 2'-O-methyl modified nucleotide
  modified_base 82: mod_base = OTHER; note = 2'-O-methyl modified nucleotide
  modified_base 83: mod_base = OTHER; note = 2'-O-methyl modified nucleotide
  modified_base 84: mod_base = OTHER; note = 2'-O-methyl modified nucleotide
  modified_base 85: mod_base = OTHER; note = 2'-O-methyl modified nucleotide
  modified_base 86: mod_base = OTHER; note = 2'-O-methyl modified nucleotide
  modified_base 87: mod_base = OTHER; note = 2'-O-methyl modified nucleotide
  modified_base 88: mod_base = OTHER; note = 2'-O-methyl modified nucleotide
  modified_base 89: mod_base = OTHER; note = 2'-O-methyl modified nucleotide
  modified_base 90: mod_base = OTHER; note = 2'-O-methyl modified nucleotide
  modified_base 91: mod_base = OTHER; note = 2'-O-methyl modified nucleotide
  modified_base 92: mod_base = OTHER; note = 2'-O-methyl modified nucleotide
  modified_base 93: mod_base = OTHER; note = 2'-O-methyl modified nucleotide
  modified_base 94: mod_base = OTHER; note = 2'-O-methyl modified nucleotide
  modified_base 95: mod_base = OTHER; note = 2'-O-methyl modified nucleotide
  modified_base 96: mod_base = OTHER; note = 2'-O-methyl modified nucleotide
  modified_base 115: mod_base = OTHER; note = Nucleotide with phosphorothioate linkage
  modified_base 116: mod_base = OTHER; note = 2'-O-methyl modified nucleotide with phosphorothioate linkage
  modified_base 117: mod_base = OTHER; note = 2'-O-methyl modified nucleotide with phosphorothioate linkage
  modified_base 118: mod_base = OTHER; note = 2'-O-methyl modified nucleotide
actcacgctggatagcctccgttttagagctagaaatagcaagttaaaataaggctagtccgttatcaacttgaaaaagtggcaccgagtcggtgcgcctggataaccggctatccag

SEQ ID NO: 17653 - RNA, 117 nt, synthetic construct
  source 1..117: mol_type = other RNA
  modified_base 1: mod_base = OTHER; note = 2'-O-methyl modified nucleotide with phosphorothioate linkage
  modified_base 2: mod_base = OTHER; note = 2'-O-methyl modified nucleotide with phosphorothioate linkage
  modified_base 3: mod_base = OTHER; note = 2'-O-methyl modified nucleotide with phosphorothioate linkage
  modified_base 29: mod_base = OTHER; note = 2'-O-methyl modified nucleotide
  modified_base 30: mod_base = OTHER; note = 2'-O-methyl modified nucleotide
  modified_base 31: mod_base = OTHER; note = 2'-O-methyl modified nucleotide
  modified_base 32: mod_base = OTHER; note = 2'-O-methyl modified nucleotide
  modified_base 33: mod_base = OTHER; note = 2'-O-methyl modified nucleotide
  modified_base 34: mod_base = OTHER; note = 2'-O-methyl modified nucleotide
  modified_base 35: mod_base = OTHER; note = 2'-O-methyl modified nucleotide
  modified_base 36: mod_base = OTHER; note = 2'-O-methyl modified nucleotide
  modified_base 37: mod_base = OTHER; note = 2'-O-methyl modified nucleotide
  modified_base 38: mod_base = OTHER; note = 2'-O-methyl modified nucleotide
  modified_base 39: mod_base = OTHER; note = 2'-O-methyl modified nucleotide
  modified_base 40: mod_base = OTHER; note = 2'-O-methyl modified nucleotide
  modified_base 69: mod_base = OTHER; note = 2'-O-methyl modified nucleotide
  modified_base 70: mod_base = OTHER; note = 2'-O-methyl modified nucleotide
  modified_base 71: mod_base = OTHER; note = 2'-O-methyl modified nucleotide
  modified_base 72: mod_base = OTHER; note = 2'-O-methyl modified nucleotide
  modified_base 73: mod_base = OTHER; note = 2'-O-methyl modified nucleotide
  modified_base 74: mod_base = OTHER; note = 2'-O-methyl modified nucleotide
  modified_base 75: mod_base = OTHER; note = 2'-O-methyl modified nucleotide
  modified_base 76: mod_base = OTHER; note = 2'-O-methyl modified nucleotide
  modified_base 77: mod_base = OTHER; note = 2'-O-methyl modified nucleotide
  modified_base 78: mod_base = OTHER; note = 2'-O-methyl modified nucleotide
  modified_base 79: mod_base = OTHER; note = 2'-O-methyl modified nucleotide
  modified_base 80: mod_base = OTHER; note = 2'-O-methyl modified nucleotide
  modified_base 81: mod_base = OTHER; note = 2'-O-methyl modified nucleotide
  modified_base 82: mod_base = OTHER; note = 2'-O-methyl modified nucleotide
  modified_base 83: mod_base = OTHER; note = 2'-O-methyl modified nucleotide
  modified_base 84: mod_base = OTHER; note = 2'-O-methyl modified nucleotide
  modified_base 85: mod_base = OTHER; note = 2'-O-methyl modified nucleotide
  modified_base 86: mod_base = OTHER; note = 2'-O-methyl modified nucleotide
  modified_base 87: mod_base = OTHER; note = 2'-O-methyl modified nucleotide
  modified_base 88: mod_base = OTHER; note = 2'-O-methyl modified nucleotide
  modified_base 89: mod_base = OTHER; note = 2'-O-methyl modified nucleotide
  modified_base 90: mod_base = OTHER; note = 2'-O-methyl modified nucleotide
  modified_base 91: mod_base = OTHER; note = 2'-O-methyl modified nucleotide
  modified_base 92: mod_base = OTHER; note = 2'-O-methyl modified nucleotide
  modified_base 93: mod_base = OTHER; note = 2'-O-methyl modified nucleotide
  modified_base 94: mod_base = OTHER; note = 2'-O-methyl modified nucleotide
  modified_base 95: mod_base = OTHER; note = 2'-O-methyl modified nucleotide
  modified_base 96: mod_base = OTHER; note = 2'-O-methyl modified nucleotide
  modified_base 114: mod_base = OTHER; note = Nucleotide with phosphorothioate linkage
  modified_base 115: mod_base = OTHER; note = 2'-O-methyl modified nucleotide with phosphorothioate linkage
  modified_base 116: mod_base = OTHER; note = 2'-O-methyl modified nucleotide with phosphorothioate linkage
  modified_base 117: mod_base = OTHER; note = 2'-O-methyl modified nucleotide
actcacgctggatagcctccgttttagagctagaaatagcaagttaaaataaggctagtccgttatcaacttgaaaaagtggcaccgagtcggtgcgcctggataaccggctatcca

SEQ ID NO: 17654 - RNA, 116 nt, synthetic construct
  source 1..116: mol_type = other RNA
  modified_base 1: mod_base = OTHER; note = 2'-O-methyl modified nucleotide with phosphorothioate linkage
  modified_base 2: mod_base = OTHER; note = 2'-O-methyl modified nucleotide with phosphorothioate linkage
  modified_base 3: mod_base = OTHER; note = 2'-O-methyl modified nucleotide with phosphorothioate linkage
  modified_base 29: mod_base = OTHER; note = 2'-O-methyl modified nucleotide
  modified_base 30: mod_base = OTHER; note = 2'-O-methyl modified nucleotide
  modified_base 31: mod_base = OTHER; note = 2'-O-methyl modified nucleotide
  modified_base 32: mod_base = OTHER; note = 2'-O-methyl modified nucleotide
  modified_base 33: mod_base = OTHER; note = 2'-O-methyl modified nucleotide
  modified_base 34: mod_base = OTHER; note = 2'-O-methyl modified nucleotide
  modified_base 35: mod_base = OTHER; note = 2'-O-methyl modified nucleotide
  modified_base 36: mod_base = OTHER; note = 2'-O-methyl modified nucleotide
  modified_base 37: mod_base = OTHER; note = 2'-O-methyl modified nucleotide
  modified_base 38: mod_base = OTHER; note = 2'-O-methyl modified nucleotide
  modified_base 39: mod_base = OTHER; note = 2'-O-methyl modified nucleotide
  modified_base 40: mod_base = OTHER; note = 2'-O-methyl modified nucleotide
  modified_base 69: mod_base = OTHER; note = 2'-O-methyl modified nucleotide
  modified_base 70: mod_base = OTHER; note = 2'-O-methyl modified nucleotide
  modified_base 71: mod_base = OTHER; note = 2'-O-methyl modified nucleotide
  modified_base 72: mod_base = OTHER; note = 2'-O-methyl modified nucleotide
  modified_base 73: mod_base = OTHER; note = 2'-O-methyl modified nucleotide
  modified_base 74: mod_base = OTHER; note = 2'-O-methyl modified nucleotide
  modified_base 75: mod_base = OTHER; note = 2'-O-methyl modified nucleotide
  modified_base 76: mod_base = OTHER; note = 2'-O-methyl modified nucleotide
  modified_base 77: mod_base = OTHER; note = 2'-O-methyl modified nucleotide
  modified_base 78: mod_base = OTHER; note = 2'-O-methyl modified nucleotide
  modified_base 79: mod_base = OTHER; note = 2'-O-methyl modified nucleotide
  modified_base 80: mod_base = OTHER; note = 2'-O-methyl modified nucleotide
  modified_base 81: mod_base = OTHER; note = 2'-O-methyl modified nucleotide
  modified_base 82: mod_base = OTHER; note = 2'-O-methyl modified nucleotide
  modified_base 83: mod_base = OTHER; note = 2'-O-methyl modified nucleotide
  modified_base 84: mod_base = OTHER; note = 2'-O-methyl modified nucleotide
  modified_base 85: mod_base = OTHER; note = 2'-O-methyl modified nucleotide
  modified_base 86: mod_base = OTHER; note = 2'-O-methyl modified nucleotide
  modified_base 87: mod_base = OTHER; note = 2'-O-methyl modified nucleotide
  modified_base 88: mod_base = OTHER; note = 2'-O-methyl modified nucleotide
  modified_base 89: mod_base = OTHER; note = 2'-O-methyl modified nucleotide
  modified_base 90: mod_base = OTHER; note = 2'-O-methyl modified nucleotide
  modified_base 91: mod_base = OTHER; note = 2'-O-methyl modified nucleotide
  modified_base 92: mod_base = OTHER; note = 2'-O-methyl modified nucleotide
  modified_base 93: mod_base = OTHER; note = 2'-O-methyl modified nucleotide
  modified_base 94: mod_base = OTHER; note = 2'-O-methyl modified nucleotide
  modified_base 95: mod_base = OTHER; note = 2'-O-methyl modified nucleotide
  modified_base 96: mod_base = OTHER; note = 2'-O-methyl modified nucleotide
  modified_base 113: mod_base = OTHER; note = Nucleotide with phosphorothioate linkage
  modified_base 114: mod_base = OTHER; note = 2'-O-methyl modified nucleotide with phosphorothioate linkage
  modified_base 115: mod_base = OTHER; note = 2'-O-methyl modified nucleotide with phosphorothioate linkage
  modified_base 116: mod_base = OTHER; note = 2'-O-methyl modified nucleotide
actcacgctggatagcctccgttttagagctagaaatagcaagttaaaataaggctagtccgttatcaacttgaaaaagtggcaccgagtcggtgcgcctggataaccggctatcc

SEQ ID NO: 17655 - RNA, 123 nt, synthetic construct
  source 1..123: mol_type = other RNA
  modified_base 1: mod_base = OTHER; note = 2'-O-methyl modified nucleotide with phosphorothioate linkage
  modified_base 2: mod_base = OTHER; note = 2'-O-methyl modified nucleotide with phosphorothioate linkage
  modified_base 3: mod_base = OTHER; note = 2'-O-methyl modified nucleotide with phosphorothioate linkage
  modified_base 29: mod_base = OTHER; note = 2'-O-methyl modified nucleotide
  modified_base 30: mod_base = OTHER; note = 2'-O-methyl modified nucleotide
  modified_base 31: mod_base = OTHER; note = 2'-O-methyl modified nucleotide
  modified_base 32: mod_base = OTHER; note = 2'-O-methyl modified nucleotide
  modified_base 33: mod_base = OTHER; note = 2'-O-methyl modified nucleotide
  modified_base 34: mod_base = OTHER; note = 2'-O-methyl modified nucleotide
  modified_base 35: mod_base = OTHER; note = 2'-O-methyl modified nucleotide
  modified_base 36: mod_base = OTHER; note = 2'-O-methyl modified nucleotide
  modified_base 37: mod_base = OTHER; note = 2'-O-methyl modified nucleotide
  modified_base 38: mod_base = OTHER; note = 2'-O-methyl modified nucleotide
  modified_base 39: mod_base = OTHER; note = 2'-O-methyl modified nucleotide
  modified_base 40: mod_base = OTHER; note = 2'-O-methyl modified nucleotide
  modified_base 69: mod_base = OTHER; note = 2'-O-methyl modified nucleotide
  modified_base 70: mod_base = OTHER; note = 2'-O-methyl modified nucleotide
  modified_base 71: mod_base = OTHER; note = 2'-O-methyl modified nucleotide
  modified_base 72: mod_base = OTHER; note = 2'-O-methyl modified nucleotide
  modified_base 73: mod_base = OTHER; note = 2'-O-methyl modified nucleotide
  modified_base 74: mod_base = OTHER; note = 2'-O-methyl modified nucleotide
  modified_base 75: mod_base = OTHER; note = 2'-O-methyl modified nucleotide
  modified_base 76: mod_base = OTHER; note = 2'-O-methyl modified nucleotide
  modified_base 77: mod_base = OTHER; note = 2'-O-methyl modified nucleotide
  modified_base 78: mod_base = OTHER; note = 2'-O-methyl modified nucleotide
  modified_base 79: mod_base = OTHER; note = 2'-O-methyl modified nucleotide
  modified_base 80: mod_base = OTHER; note = 2'-O-methyl modified nucleotide
  modified_base 81: mod_base = OTHER; note = 2'-O-methyl modified nucleotide
  modified_base 82: mod_base = OTHER; note = 2'-O-methyl modified nucleotide
  modified_base 83: mod_base = OTHER; note = 2'-O-methyl modified nucleotide
  modified_base 84: mod_base = OTHER; note = 2'-O-methyl modified nucleotide
  modified_base 85: mod_base = OTHER; note = 2'-O-methyl modified nucleotide
  modified_base 86: mod_base = OTHER; note = 2'-O-methyl modified nucleotide
  modified_base 87: mod_base = OTHER; note = 2'-O-methyl modified nucleotide
  modified_base 88: mod_base = OTHER; note = 2'-O-methyl modified nucleotide
  modified_base 89: mod_base = OTHER; note = 2'-O-methyl modified nucleotide
  modified_base 90: mod_base = OTHER; note = 2'-O-methyl modified nucleotide
  modified_base 91: mod_base = OTHER; note = 2'-O-methyl modified nucleotide
  modified_base 92: mod_base = OTHER; note = 2'-O-methyl modified nucleotide
  modified_base 93: mod_base = OTHER; note = 2'-O-methyl modified nucleotide
  modified_base 94: mod_base = OTHER; note = 2'-O-methyl modified nucleotide
  modified_base 95: mod_base = OTHER; note = 2'-O-methyl modified nucleotide
  modified_base 96: mod_base = OTHER; note = 2'-O-methyl modified nucleotide
  modified_base 120: mod_base = OTHER; note = Nucleotide with phosphorothioate linkage
  modified_base 121: mod_base = OTHER; note = 2'-O-methyl modified nucleotide with phosphorothioate linkage
  modified_base 122: mod_base = OTHER; note = 2'-O-methyl modified nucleotide with phosphorothioate linkage
  modified_base 123: mod_base = OTHER; note = 2'-O-methyl modified nucleotide
actcacgctggatagcctccgttttagagctagaaatagcaagttaaaataaggctagtccgttatcaacttgaaaaagtggcaccgagtcggtgctggcctggataaccggctatccagcgt

SEQ ID NO: 17656 - RNA, 122 nt, synthetic construct
  source 1..122: mol_type = other RNA
  modified_base 1: mod_base = OTHER; note = 2'-O-methyl modified nucleotide with phosphorothioate linkage
  modified_base 2: mod_base = OTHER; note = 2'-O-methyl modified nucleotide with phosphorothioate linkage
  modified_base 3: mod_base = OTHER; note = 2'-O-methyl modified nucleotide with phosphorothioate linkage
  modified_base 29: mod_base = OTHER; note = 2'-O-methyl modified nucleotide
  modified_base 30: mod_base = OTHER; note = 2'-O-methyl modified nucleotide
  modified_base 31: mod_base = OTHER; note = 2'-O-methyl modified nucleotide
  modified_base 32: mod_base = OTHER; note = 2'-O-methyl modified nucleotide
  modified_base 33: mod_base = OTHER; note = 2'-O-methyl modified nucleotide
  modified_base 34: mod_base = OTHER; note = 2'-O-methyl modified nucleotide
  modified_base 35: mod_base = OTHER; note = 2'-O-methyl modified nucleotide
  modified_base 36: mod_base = OTHER; note = 2'-O-methyl modified nucleotide
  modified_base 37: mod_base = OTHER; note = 2'-O-methyl modified nucleotide
  modified_base 38: mod_base = OTHER; note = 2'-O-methyl modified nucleotide
  modified_base 39: mod_base = OTHER; note = 2'-O-methyl modified nucleotide
  modified_base 40: mod_base = OTHER; note = 2'-O-methyl modified nucleotide
  modified_base 69: mod_base = OTHER; note = 2'-O-methyl modified nucleotide
  modified_base 70: mod_base = OTHER; note = 2'-O-methyl modified nucleotide
  modified_base 71: mod_base = OTHER; note = 2'-O-methyl modified nucleotide
  modified_base 72: mod_base = OTHER; note = 2'-O-methyl modified nucleotide
  modified_base 73: mod_base = OTHER; note = 2'-O-methyl modified nucleotide
  modified_base 74: mod_base = OTHER; note = 2'-O-methyl modified nucleotide
  modified_base 75: mod_base = OTHER; note = 2'-O-methyl modified nucleotide
  modified_base 76: mod_base = OTHER; note = 2'-O-methyl modified nucleotide
  modified_base 77: mod_base = OTHER; note = 2'-O-methyl modified nucleotide
  modified_base 78: mod_base = OTHER; note = 2'-O-methyl modified nucleotide
  modified_base 79: mod_base = OTHER; note = 2'-O-methyl modified nucleotide
  modified_base 80: mod_base = OTHER; note = 2'-O-methyl modified nucleotide
  modified_base 81: mod_base = OTHER; note = 2'-O-methyl modified nucleotide
  modified_base 82: mod_base = OTHER; note = 2'-O-methyl modified nucleotide
  modified_base 83: mod_base = OTHER; note = 2'-O-methyl modified nucleotide
  modified_base 84: mod_base = OTHER; note = 2'-O-methyl modified nucleotide
  modified_base 85: mod_base = OTHER; note = 2'-O-methyl modified nucleotide
  modified_base 86: mod_base = OTHER; note = 2'-O-methyl modified nucleotide
  modified_base 87: mod_base = OTHER; note = 2'-O-methyl modified nucleotide
  modified_base 88: mod_base = OTHER; note = 2'-O-methyl modified nucleotide
  modified_base 89: mod_base = OTHER; note = 2'-O-methyl modified nucleotide
  modified_base 90: mod_base = OTHER; note = 2'-O-methyl modified nucleotide
  modified_base 91: mod_base = OTHER; note = 2'-O-methyl modified nucleotide
  modified_base 92: mod_base = OTHER; note = 2'-O-methyl modified nucleotide
  modified_base 93: mod_base = OTHER; note = 2'-O-methyl modified nucleotide
  modified_base 94: mod_base = OTHER; note = 2'-O-methyl modified nucleotide
  modified_base 95: mod_base = OTHER; note = 2'-O-methyl modified nucleotide
  modified_base 96: mod_base = OTHER; note = 2'-O-methyl modified nucleotide
  modified_base 119: mod_base = OTHER; note = Nucleotide with phosphorothioate linkage
  modified_base 120: mod_base = OTHER; note = 2'-O-methyl modified nucleotide with phosphorothioate linkage
  modified_base 121: mod_base = OTHER; note = 2'-O-methyl modified nucleotide with phosphorothioate linkage
  modified_base 122: mod_base = OTHER; note = 2'-O-methyl modified nucleotide
actcacgctggatagcctccgttttagagctagaaatagcaagttaaaataaggctagtccgttatcaacttgaaaaagtggcaccgagtcggtgctggcctggataaccggctatccagcg

SEQ ID NO: 17657 - RNA, 121 nt, synthetic construct
  source 1..121: mol_type = other RNA
  modified_base 1: mod_base = OTHER; note = 2'-O-methyl modified nucleotide with phosphorothioate linkage
  modified_base 2: mod_base = OTHER; note = 2'-O-methyl modified nucleotide with phosphorothioate linkage
  modified_base 3: mod_base = OTHER; note = 2'-O-methyl modified nucleotide with phosphorothioate linkage
  modified_base 29: mod_base = OTHER; note = 2'-O-methyl modified nucleotide
  modified_base 30: mod_base = OTHER; note = 2'-O-methyl modified nucleotide
  modified_base 31: mod_base = OTHER; note = 2'-O-methyl modified nucleotide
  modified_base 32: mod_base = OTHER; note = 2'-O-methyl modified nucleotide
  modified_base 33: mod_base = OTHER; note = 2'-O-methyl modified nucleotide
  modified_base 34: mod_base = OTHER; note = 2'-O-methyl modified nucleotide
  modified_base 35: mod_base = OTHER; note = 2'-O-methyl modified nucleotide
  modified_base 36: mod_base = OTHER; note = 2'-O-methyl modified nucleotide
  modified_base 37: mod_base = OTHER; note = 2'-O-methyl modified nucleotide
  modified_base 38: mod_base = OTHER; note = 2'-O-methyl modified nucleotide
  modified_base 39: mod_base = OTHER; note = 2'-O-methyl modified nucleotide
  modified_base 40: mod_base = OTHER; note = 2'-O-methyl modified nucleotide
  modified_base 69: mod_base = OTHER; note = 2'-O-methyl modified nucleotide
  modified_base 70: mod_base = OTHER; note = 2'-O-methyl modified nucleotide
  modified_base 71: mod_base = OTHER; note = 2'-O-methyl modified nucleotide
  modified_base 72: mod_base = OTHER; note = 2'-O-methyl modified nucleotide
  modified_base 73: mod_base = OTHER; note = 2'-O-methyl modified nucleotide
  modified_base 74: mod_base = OTHER; note = 2'-O-methyl modified nucleotide
  modified_base 75: mod_base = OTHER; note = 2'-O-methyl modified nucleotide
  modified_base 76: mod_base = OTHER; note = 2'-O-methyl modified nucleotide
  modified_base 77: mod_base = OTHER; note = 2'-O-methyl modified nucleotide
  modified_base 78: mod_base = OTHER; note = 2'-O-methyl modified nucleotide
  modified_base 79: mod_base = OTHER; note = 2'-O-methyl modified nucleotide
  modified_base 80: mod_base = OTHER; note = 2'-O-methyl modified nucleotide
  modified_base 81: mod_base = OTHER; note = 2'-O-methyl modified nucleotide
  modified_base 82: mod_base = OTHER; note = 2'-O-methyl modified nucleotide
  modified_base 83: mod_base = OTHER; note = 2'-O-methyl modified nucleotide
  modified_base 84: mod_base = OTHER; note = 2'-O-methyl modified nucleotide
  modified_base 85: mod_base = OTHER; note = 2'-O-methyl modified nucleotide
  modified_base 86: mod_base = OTHER; note = 2'-O-methyl modified nucleotide
  modified_base 87: mod_base = OTHER; note = 2'-O-methyl modified nucleotide
  modified_base 88: mod_base = OTHER; note = 2'-O-methyl modified nucleotide
  modified_base 89: mod_base = OTHER; note = 2'-O-methyl modified nucleotide
  modified_base 90: mod_base = OTHER; note = 2'-O-methyl modified nucleotide
  modified_base 91: mod_base = OTHER; note = 2'-O-methyl modified nucleotide
  modified_base 92: mod_base = OTHER; note = 2'-O-methyl modified nucleotide
  modified_base 93: mod_base = OTHER; note = 2'-O-methyl modified nucleotide
  modified_base 94: mod_base = OTHER; note = 2'-O-methyl modified nucleotide
  modified_base 95: mod_base = OTHER; note = 2'-O-methyl modified nucleotide
  modified_base 96: mod_base = OTHER; note = 2'-O-methyl modified nucleotide
  modified_base 118: mod_base = OTHER; note = Nucleotide with phosphorothioate linkage
  modified_base 119: mod_base = OTHER; note = 2'-O-methyl modified nucleotide with phosphorothioate linkage
  modified_base 120: mod_base = OTHER; note = 2'-O-methyl modified nucleotide with phosphorothioate linkage
  modified_base 121: mod_base = OTHER; note = 2'-O-methyl modified nucleotide
actcacgctggatagcctccgttttagagctagaaatagcaagttaaaataaggctagtccgttatcaacttgaaaaagtggcaccgagtcggtgctggcctggataaccggctatccagc

SEQ ID NO: 17658 - RNA, 120 nt, synthetic construct
  source 1..120: mol_type = other RNA
  modified_base 1: mod_base = OTHER; note = 2'-O-methyl modified nucleotide with phosphorothioate linkage
  modified_base 2: mod_base = OTHER; note = 2'-O-methyl modified nucleotide with phosphorothioate linkage
  modified_base 3: mod_base = OTHER; note = 2'-O-methyl modified nucleotide with phosphorothioate linkage
  modified_base 29: mod_base = OTHER; note = 2'-O-methyl modified nucleotide
  modified_base 30: mod_base = OTHER; note = 2'-O-methyl modified nucleotide
  modified_base 31: mod_base = OTHER; note = 2'-O-methyl modified nucleotide
  modified_base 32: mod_base = OTHER; note = 2'-O-methyl modified nucleotide
  modified_base 33: mod_base = OTHER; note = 2'-O-methyl modified nucleotide
  modified_base 34: mod_base = OTHER; note = 2'-O-methyl modified nucleotide
  modified_base 35: mod_base = OTHER; note = 2'-O-methyl modified nucleotide
  modified_base 36: mod_base = OTHER; note = 2'-O-methyl modified nucleotide
  modified_base 37: mod_base = OTHER; note = 2'-O-methyl modified nucleotide
  modified_base 38: mod_base = OTHER; note = 2'-O-methyl modified nucleotide
  modified_base 39: mod_base = OTHER; note = 2'-O-methyl modified nucleotide
  modified_base 40: mod_base = OTHER; note = 2'-O-methyl modified nucleotide
  modified_base 69: mod_base = OTHER; note = 2'-O-methyl modified nucleotide
  modified_base 70: mod_base = OTHER; note = 2'-O-methyl modified nucleotide
  modified_base 71: mod_base = OTHER; note = 2'-O-methyl modified nucleotide
  modified_base 72: mod_base = OTHER; note = 2'-O-methyl modified nucleotide
  modified_base 73: mod_base = OTHER; note = 2'-O-methyl modified nucleotide
  modified_base 74: mod_base = OTHER; note = 2'-O-methyl modified nucleotide
  modified_base 75: mod_base = OTHER; note = 2'-O-methyl modified nucleotide
  modified_base 76: mod_base = OTHER; note = 2'-O-methyl modified nucleotide
  modified_base 77: mod_base = OTHER; note = 2'-O-methyl modified nucleotide
  modified_base 78: mod_base = OTHER; note = 2'-O-methyl modified nucleotide
  modified_base 79: mod_base = OTHER; note = 2'-O-methyl modified nucleotide
  modified_base 80: mod_base = OTHER; note = 2'-O-methyl modified nucleotide
  modified_base 81: mod_base = OTHER; note = 2'-O-methyl modified nucleotide
  modified_base 82: mod_base = OTHER; note = 2'-O-methyl modified nucleotide
  modified_base 83: mod_base = OTHER; note = 2'-O-methyl modified nucleotide
  modified_base 84: mod_base = OTHER; note = 2'-O-methyl modified nucleotide
  modified_base 85: mod_base = OTHER; note = 2'-O-methyl modified nucleotide
  modified_base 86: mod_base = OTHER; note = 2'-O-methyl modified nucleotide
  modified_base 87: mod_base = OTHER; note = 2'-O-methyl modified nucleotide
  modified_base 88: mod_base = OTHER; note = 2'-O-methyl modified nucleotide
  modified_base 89: mod_base = OTHER; note = 2'-O-methyl modified nucleotide
  modified_base 90: mod_base = OTHER; note = 2'-O-methyl modified nucleotide
  modified_base 91: mod_base = OTHER; note = 2'-O-methyl modified nucleotide
  modified_base 92: mod_base = OTHER; note = 2'-O-methyl modified nucleotide
  modified_base 93: mod_base = OTHER; note = 2'-O-methyl modified nucleotide
  modified_base 94: mod_base = OTHER; note = 2'-O-methyl modified nucleotide
  modified_base 95: mod_base = OTHER; note = 2'-O-methyl modified nucleotide
  modified_base 96: mod_base = OTHER; note = 2'-O-methyl modified nucleotide
  modified_base 117: mod_base = OTHER; note = Nucleotide with phosphorothioate linkage
  modified_base 118: mod_base = OTHER; note = 2'-O-methyl modified nucleotide with phosphorothioate linkage
  modified_base 119: mod_base = OTHER; note = 2'-O-methyl modified nucleotide with phosphorothioate linkage
  modified_base 120: mod_base = OTHER; note = 2'-O-methyl modified nucleotide
actcacgctggatagcctccgttttagagctagaaatagcaagttaaaataaggctagtccgttatcaacttgaaaaagtggcaccgagtcggtgctggcctggataaccggctatccag

SEQ ID NO: 17659 - RNA, 119 nt, synthetic construct
  source 1..119: mol_type = other RNA
  modified_base 1: mod_base = OTHER; note = 2'-O-methyl modified nucleotide with phosphorothioate linkage
  modified_base 2: mod_base = OTHER; note = 2'-O-methyl modified nucleotide with phosphorothioate linkage
  modified_base 3: mod_base = OTHER; note = 2'-O-methyl modified nucleotide with phosphorothioate linkage
  modified_base 29: mod_base = OTHER; note = 2'-O-methyl modified nucleotide
  modified_base 30: mod_base = OTHER; note = 2'-O-methyl modified nucleotide
  modified_base 31: mod_base = OTHER; note = 2'-O-methyl modified nucleotide
  modified_base 32: mod_base = OTHER; note = 2'-O-methyl modified nucleotide
  modified_base 33: mod_base = OTHER; note = 2'-O-methyl modified nucleotide
  modified_base 34: mod_base = OTHER; note = 2'-O-methyl modified nucleotide
  modified_base 35: mod_base = OTHER; note = 2'-O-methyl modified nucleotide
  modified_base 36: mod_base = OTHER; note = 2'-O-methyl modified nucleotide
  modified_base 37: mod_base = OTHER; note = 2'-O-methyl modified nucleotide
  modified_base 38: mod_base = OTHER; note = 2'-O-methyl modified nucleotide
  modified_base 39: mod_base = OTHER; note = 2'-O-methyl modified nucleotide
  modified_base 40: mod_base = OTHER; note = 2'-O-methyl modified nucleotide
  modified_base 69: mod_base = OTHER; note = 2'-O-methyl modified nucleotide
  modified_base 70: mod_base = OTHER; note = 2'-O-methyl modified nucleotide
  modified_base 71: mod_base = OTHER; note = 2'-O-methyl modified nucleotide
  modified_base 72: mod_base = OTHER; note = 2'-O-methyl modified nucleotide
  modified_base 73: mod_base = OTHER; note = 2'-O-methyl modified nucleotide
  modified_base 74: mod_base = OTHER; note = 2'-O-methyl modified nucleotide
  modified_base 75: mod_base = OTHER; note = 2'-O-methyl modified nucleotide
  modified_base 76: mod_base = OTHER; note = 2'-O-methyl modified nucleotide
  modified_base 77: mod_base = OTHER; note = 2'-O-methyl modified nucleotide
  modified_base 78: mod_base = OTHER; note = 2'-O-methyl modified nucleotide
  modified_base 79: mod_base = OTHER; note = 2'-O-methyl modified nucleotide
  modified_base 80: mod_base = OTHER; note = 2'-O-methyl modified nucleotide
  modified_base 81: mod_base = OTHER; note = 2'-O-methyl modified nucleotide
  modified_base 82: mod_base = OTHER; note = 2'-O-methyl modified nucleotide
  modified_base 83: mod_base = OTHER; note = 2'-O-methyl modified nucleotide
  modified_base 84: mod_base = OTHER; note = 2'-O-methyl modified nucleotide
  modified_base 85: mod_base = OTHER; note = 2'-O-methyl modified nucleotide
  modified_base 86: mod_base = OTHER; note = 2'-O-methyl modified nucleotide
  modified_base 87: mod_base = OTHER; note = 2'-O-methyl modified nucleotide
  modified_base 88: mod_base = OTHER; note = 2'-O-methyl modified nucleotide
  modified_base 89: mod_base = OTHER; note = 2'-O-methyl modified nucleotide
  modified_base 90: mod_base = OTHER; note = 2'-O-methyl modified nucleotide
  modified_base 91: mod_base = OTHER; note = 2'-O-methyl modified nucleotide
  modified_base 92: mod_base = OTHER; note = 2'-O-methyl modified nucleotide
  modified_base 93: mod_base = OTHER; note = 2'-O-methyl modified nucleotide
  modified_base 94: mod_base = OTHER; note = 2'-O-methyl modified nucleotide
  modified_base 95: mod_base = OTHER; note = 2'-O-methyl modified nucleotide
  modified_base 96: mod_base = OTHER; note = 2'-O-methyl modified nucleotide
  modified_base 116: mod_base = OTHER; note = Nucleotide with phosphorothioate linkage
  modified_base 117: mod_base = OTHER; note = 2'-O-methyl modified nucleotide with phosphorothioate linkage
  modified_base 118: mod_base = OTHER; note = 2'-O-methyl modified nucleotide with phosphorothioate linkage
  modified_base 119: mod_base = OTHER; note = 2'-O-methyl modified nucleotide
actcacgctggatagcctccgttttagagctagaaatagcaagttaaaataaggctagtccgttatcaacttgaaaaagtggcaccgagtcggtgctggcctggataaccggctatcca

SEQ ID NO: 17660 - RNA, 118 nt, synthetic construct
  source 1..118: mol_type = other RNA
  modified_base 1: mod_base = OTHER; note = 2'-O-methyl modified nucleotide with phosphorothioate linkage
  modified_base 2: mod_base = OTHER; note = 2'-O-methyl modified nucleotide with phosphorothioate linkage
  modified_base 3: mod_base = OTHER; note = 2'-O-methyl modified nucleotide with phosphorothioate linkage
  modified_base 29: mod_base = OTHER; note = 2'-O-methyl modified nucleotide
  modified_base 30: mod_base = OTHER; note = 2'-O-methyl modified nucleotide
  modified_base 31: mod_base = OTHER; note = 2'-O-methyl modified nucleotide
  modified_base 32: mod_base = OTHER; note = 2'-O-methyl modified nucleotide
  modified_base 33: mod_base = OTHER; note = 2'-O-methyl modified nucleotide
  modified_base 34: mod_base = OTHER; note = 2'-O-methyl modified nucleotide
  modified_base 35: mod_base = OTHER; note = 2'-O-methyl modified nucleotide
  modified_base 36: mod_base = OTHER; note = 2'-O-methyl modified nucleotide
  modified_base 37: mod_base = OTHER; note = 2'-O-methyl modified nucleotide
  modified_base 38: mod_base = OTHER; note = 2'-O-methyl modified nucleotide
  modified_base 39: mod_base = OTHER; note = 2'-O-methyl modified nucleotide
  modified_base 40: mod_base = OTHER; note = 2'-O-methyl modified nucleotide
  modified_base 69: mod_base = OTHER; note = 2'-O-methyl modified nucleotide
  modified_base 70: mod_base = OTHER; note = 2'-O-methyl modified nucleotide
  modified_base 71: mod_base = OTHER; note = 2'-O-methyl modified nucleotide
  modified_base 72: mod_base = OTHER; note = 2'-O-methyl modified nucleotide
  modified_base 73: mod_base = OTHER; note = 2'-O-methyl modified nucleotide
  modified_base 74: mod_base = OTHER; note = 2'-O-methyl modified nucleotide
  modified_base 75: mod_base = OTHER; note = 2'-O-methyl modified nucleotide
  modified_base 76: mod_base = OTHER; note = 2'-O-methyl modified nucleotide
  modified_base 77: mod_base = OTHER; note = 2'-O-methyl modified nucleotide
  modified_base 78: mod_base = OTHER; note = 2'-O-methyl modified nucleotide
  modified_base 79: mod_base = OTHER; note = 2'-O-methyl modified nucleotide
  modified_base 80: mod_base = OTHER; note = 2'-O-methyl modified nucleotide
  modified_base 81: mod_base = OTHER; note = 2'-O-methyl modified nucleotide
  modified_base 82: mod_base = OTHER; note = 2'-O-methyl modified nucleotide
  modified_base 83: mod_base = OTHER; note = 2'-O-methyl modified nucleotide
  modified_base 84: mod_base = OTHER; note = 2'-O-methyl modified nucleotide
  modified_base 85: mod_base = OTHER; note = 2'-O-methyl modified nucleotide
  modified_base 86: mod_base = OTHER; note = 2'-O-methyl modified nucleotide
  modified_base 87: mod_base = OTHER; note = 2'-O-methyl modified nucleotide
  modified_base 88: mod_base = OTHER; note = 2'-O-methyl modified nucleotide
  modified_base 89: mod_base = OTHER; note = 2'-O-methyl modified nucleotide
  modified_base 90: mod_base = OTHER; note = 2'-O-methyl modified nucleotide
  modified_base 91: mod_base = OTHER; note = 2'-O-methyl modified nucleotide
  modified_base 92: mod_base = OTHER; note = 2'-O-methyl modified nucleotide
  modified_base 93: mod_base = OTHER; note = 2'-O-methyl modified nucleotide
  modified_base 94: mod_base = OTHER; note = 2'-O-methyl modified nucleotide
  modified_base 95: mod_base = OTHER; note = 2'-O-methyl modified nucleotide
  modified_base 96: mod_base = OTHER; note = 2'-O-methyl modified nucleotide
  modified_base 115: mod_base = OTHER; note = Nucleotide with phosphorothioate linkage
  modified_base 116: mod_base = OTHER; note = 2'-O-methyl modified nucleotide with phosphorothioate linkage
  modified_base 117: mod_base = OTHER; note = 2'-O-methyl modified nucleotide with phosphorothioate linkage
  modified_base 118: mod_base = OTHER; note = 2'-O-methyl modified nucleotide
actcacgctggatagcctccgttttagagctagaaatagcaagttaaaataaggctagtccgttatcaacttgaaaaagtggcaccgagtcggtgctggcctggataaccggctatcc

SEQ ID NO: 17661 - RNA, 125 nt, synthetic construct
  source 1..125: mol_type = other RNA
  modified_base 1: mod_base = OTHER; note = 2'-O-methyl modified nucleotide with phosphorothioate linkage
  modified_base 2: mod_base = OTHER; note = 2'-O-methyl modified nucleotide with phosphorothioate linkage
  modified_base 3: mod_base = OTHER; note = 2'-O-methyl modified nucleotide with phosphorothioate linkage
  modified_base 29: mod_base = OTHER; note = 2'-O-methyl modified nucleotide
  modified_base 30: mod_base = OTHER; note = 2'-O-methyl modified nucleotide
  modified_base 31: mod_base = OTHER; note = 2'-O-methyl modified nucleotide
  modified_base 32: mod_base = OTHER; note = 2'-O-methyl modified nucleotide
  modified_base 33: mod_base = OTHER; note = 2'-O-methyl modified nucleotide
  modified_base 34: mod_base = OTHER; note = 2'-O-methyl modified nucleotide
  modified_base 35: mod_base = OTHER; note = 2'-O-methyl modified nucleotide
  modified_base 36: mod_base = OTHER; note = 2'-O-methyl modified nucleotide
  modified_base 37: mod_base = OTHER; note = 2'-O-methyl modified nucleotide
  modified_base 38: mod_base = OTHER; note = 2'-O-methyl modified nucleotide
  modified_base 39: mod_base = OTHER; note = 2'-O-methyl modified nucleotide
  modified_base 40: mod_base = OTHER; note = 2'-O-methyl modified nucleotide
  modified_base 69: mod_base = OTHER; note = 2'-O-methyl modified nucleotide
  modified_base 70: mod_base = OTHER; note = 2'-O-methyl modified nucleotide
  modified_base 71: mod_base = OTHER; note = 2'-O-methyl modified nucleotide
  modified_base 72: mod_base = OTHER; note = 2'-O-methyl modified nucleotide
  modified_base 73: mod_base = OTHER; note = 2'-O-methyl modified nucleotide
  modified_base 74: mod_base = OTHER; note = 2'-O-methyl modified nucleotide
  modified_base 75: mod_base = OTHER; note = 2'-O-methyl modified nucleotide
  modified_base 76: mod_base = OTHER; note = 2'-O-methyl modified nucleotide
  modified_base 77: mod_base = OTHER; note = 2'-O-methyl modified nucleotide
  modified_base 78: mod_base = OTHER; note = 2'-O-methyl modified nucleotide
  modified_base 79: mod_base = OTHER; note = 2'-O-methyl modified nucleotide
  modified_base 80: mod_base = OTHER; note = 2'-O-methyl modified nucleotide
  modified_base 81: mod_base = OTHER; note = 2'-O-methyl modified nucleotide
  modified_base 82: mod_base = OTHER; note = 2'-O-methyl modified nucleotide
  modified_base 83: mod_base = OTHER; note = 2'-O-methyl modified nucleotide
  modified_base 84: mod_base = OTHER; note = 2'-O-methyl modified nucleotide
  modified_base 85: mod_base = OTHER; note = 2'-O-methyl modified nucleotide
  modified_base 86: mod_base = OTHER; note = 2'-O-methyl modified nucleotide
  modified_base 87: mod_base = OTHER; note = 2'-O-methyl modified nucleotide
  modified_base 88: mod_base = OTHER; note = 2'-O-methyl modified nucleotide
  modified_base 89: mod_base = OTHER; note = 2'-O-methyl modified nucleotide
  modified_base 90: mod_base = OTHER; note = 2'-O-methyl modified nucleotide
  modified_base 91: mod_base = OTHER; note = 2'-O-methyl modified nucleotide
  modified_base 92: mod_base = OTHER; note = 2'-O-methyl modified nucleotide
  modified_base 93: mod_base = OTHER; note = 2'-O-methyl modified nucleotide
  modified_base 94: mod_base = OTHER; note = 2'-O-methyl modified nucleotide
  modified_base 95: mod_base = OTHER; note = 2'-O-methyl modified nucleotide
  modified_base 96: mod_base = OTHER; note = 2'-O-methyl modified nucleotide
  modified_base 122: mod_base = OTHER; note = Nucleotide with phosphorothioate linkage
  modified_base 123: mod_base = OTHER; note = 2'-O-methyl modified nucleotide with phosphorothioate linkage
  modified_base 124: mod_base = OTHER; note = 2'-O-methyl modified nucleotide with phosphorothioate linkage
  modified_base 125: mod_base = OTHER; note = 2'-O-methyl modified nucleotide
actcacgctggatagcctccgttttagagctagaaatagcaagttaaaataaggctagtccgttatcaacttgaaaaagtggcaccgagtcggtgctctggcctggataaccggctatccagcgt

SEQ ID NO: 17662 - RNA, 124 nt, synthetic construct
  source 1..124: mol_type = other RNA
  modified_base 1: mod_base = OTHER; note = 2'-O-methyl modified nucleotide with phosphorothioate linkage
  modified_base 2: mod_base = OTHER; note = 2'-O-methyl modified nucleotide with phosphorothioate linkage
  modified_base 3: mod_base = OTHER; note = 2'-O-methyl modified nucleotide with phosphorothioate linkage
  modified_base 29: mod_base = OTHER; note = 2'-O-methyl modified nucleotide
  modified_base 30: mod_base = OTHER; note = 2'-O-methyl modified nucleotide
  modified_base 31: mod_base = OTHER; note = 2'-O-methyl modified nucleotide
  modified_base 32: mod_base = OTHER; note = 2'-O-methyl modified nucleotide
  modified_base 33: mod_base = OTHER; note = 2'-O-methyl modified nucleotide
  modified_base 34: mod_base = OTHER; note = 2'-O-methyl modified nucleotide
  modified_base 35: mod_base = OTHER; note = 2'-O-methyl modified nucleotide
  modified_base 36: mod_base = OTHER; note = 2'-O-methyl modified nucleotide
  modified_base 37: mod_base = OTHER; note = 2'-O-methyl modified nucleotide
  modified_base 38: mod_base = OTHER; note = 2'-O-methyl modified nucleotide
  modified_base 39: mod_base = OTHER; note = 2'-O-methyl modified nucleotide
  modified_base 40: mod_base = OTHER; note = 2'-O-methyl modified nucleotide
  modified_base 69: mod_base = OTHER; note = 2'-O-methyl modified nucleotide
  modified_base 70: mod_base = OTHER; note = 2'-O-methyl modified nucleotide
  modified_base 71: mod_base = OTHER; note = 2'-O-methyl modified nucleotide
  modified_base 72: mod_base = OTHER; note = 2'-O-methyl modified nucleotide
  modified_base 73: mod_base = OTHER; note = 2'-O-methyl modified nucleotide
  modified_base 74: mod_base = OTHER; note = 2'-O-methyl modified nucleotide
  modified_base 75: mod_base = OTHER; note = 2'-O-methyl modified nucleotide
  modified_base 76: mod_base = OTHER; note = 2'-O-methyl modified nucleotide
  modified_base 77: mod_base = OTHER; note = 2'-O-methyl modified nucleotide
  modified_base 78: mod_base = OTHER; note = 2'-O-methyl modified nucleotide
  modified_base 79: mod_base = OTHER; note = 2'-O-methyl modified nucleotide
  modified_base 80: mod_base = OTHER; note = 2'-O-methyl modified nucleotide
  modified_base 81: mod_base = OTHER; note = 2'-O-methyl modified nucleotide
  modified_base 82: mod_base = OTHER; note = 2'-O-methyl modified nucleotide
  modified_base 83: mod_base = OTHER; note = 2'-O-methyl modified nucleotide
  modified_base 84: mod_base = OTHER; note = 2'-O-methyl modified nucleotide
  modified_base 85: mod_base = OTHER; note = 2'-O-methyl modified nucleotide
  modified_base 86: mod_base = OTHER; note = 2'-O-methyl modified nucleotide
  modified_base 87: mod_base = OTHER; note = 2'-O-methyl modified nucleotide
  modified_base 88: mod_base = OTHER; note = 2'-O-methyl modified nucleotide
  modified_base 89: mod_base = OTHER; note = 2'-O-methyl modified nucleotide
  modified_base 90: mod_base = OTHER; note = 2'-O-methyl modified nucleotide
  modified_base 91: mod_base = OTHER; note = 2'-O-methyl modified nucleotide
  modified_base 92: mod_base = OTHER; note = 2'-O-methyl modified nucleotide
  modified_base 93: mod_base = OTHER; note = 2'-O-methyl modified nucleotide
  modified_base 94: mod_base = OTHER; note = 2'-O-methyl modified nucleotide
  modified_base 95: mod_base = OTHER; note = 2'-O-methyl modified nucleotide
  modified_base 96: mod_base = OTHER; note = 2'-O-methyl modified nucleotide
  modified_base 121: mod_base = OTHER; note = Nucleotide with phosphorothioate linkage
  modified_base 122: mod_base = OTHER; note = 2'-O-methyl modified nucleotide with phosphorothioate linkage
  modified_base 123: mod_base = OTHER; note = 2'-O-methyl modified nucleotide with phosphorothioate linkage
  modified_base 124: mod_base = OTHER; note = 2'-O-methyl modified nucleotide
actcacgctggatagcctccgttttagagctagaaatagcaagttaaaataaggctagtccgttatcaacttgaaaaagtggcaccgagtcggtgctctggcctggataaccggctatccagcg

SEQ ID NO: 17663 - RNA, 123 nt, synthetic construct
  source 1..123: mol_type = other RNA
  modified_base 1: mod_base = OTHER; note = 2'-O-methyl modified nucleotide with phosphorothioate linkage
  modified_base 2: mod_base = OTHER; note = 2'-O-methyl modified nucleotide with phosphorothioate linkage
  modified_base 3: mod_base = OTHER; note = 2'-O-methyl modified nucleotide with phosphorothioate linkage
  modified_base 29: mod_base = OTHER; note = 2'-O-methyl modified nucleotide
  modified_base 30: mod_base = OTHER; note = 2'-O-methyl modified nucleotide
  modified_base 31: mod_base = OTHER; note = 2'-O-methyl modified nucleotide
  modified_base 32: mod_base = OTHER; note = 2'-O-methyl modified nucleotide
  modified_base 33: mod_base = OTHER; note = 2'-O-methyl modified nucleotide
  modified_base 34: mod_base = OTHER; note = 2'-O-methyl modified nucleotide
  modified_base 35: mod_base = OTHER; note = 2'-O-methyl modified nucleotide
  modified_base 36: mod_base = OTHER; note = 2'-O-methyl modified nucleotide
  modified_base 37: mod_base = OTHER; note = 2'-O-methyl modified nucleotide
  modified_base 38: mod_base = OTHER; note = 2'-O-methyl modified nucleotide
  modified_base 39: mod_base = OTHER; note = 2'-O-methyl modified nucleotide
  modified_base 40: mod_base = OTHER; note = 2'-O-methyl modified nucleotide
  modified_base 69: mod_base = OTHER; note = 2'-O-methyl modified nucleotide
  modified_base 70: mod_base = OTHER; note = 2'-O-methyl modified nucleotide
  modified_base 71: mod_base = OTHER; note = 2'-O-methyl modified nucleotide
  modified_base 72: mod_base = OTHER; note = 2'-O-methyl modified nucleotide
  modified_base 73: mod_base = OTHER; note = 2'-O-methyl modified nucleotide
  modified_base 74: mod_base = OTHER; note = 2'-O-methyl modified nucleotide
  modified_base 75: mod_base = OTHER; note = 2'-O-methyl modified nucleotide
  modified_base 76: mod_base = OTHER; note = 2'-O-methyl modified nucleotide
  modified_base 77: mod_base = OTHER; note = 2'-O-methyl modified nucleotide
  modified_base 78: mod_base = OTHER; note = 2'-O-methyl modified nucleotide
  modified_base 79: mod_base = OTHER; note = 2'-O-methyl modified nucleotide
  modified_base 80: mod_base = OTHER; note = 2'-O-methyl modified nucleotide
  modified_base 81: mod_base = OTHER; note = 2'-O-methyl modified nucleotide
  modified_base 82: mod_base = OTHER; note = 2'-O-methyl modified nucleotide
  modified_base 83: mod_base = OTHER; note = 2'-O-methyl modified nucleotide
  modified_base 84: mod_base = OTHER; note = 2'-O-methyl modified nucleotide
  modified_base 85: mod_base = OTHER; note = 2'-O-methyl modified nucleotide
  modified_base 86: mod_base = OTHER; note = 2'-O-methyl modified nucleotide
  modified_base 87: mod_base = OTHER; note = 2'-O-methyl modified nucleotide
  modified_base 88: mod_base = OTHER; note = 2'-O-methyl modified nucleotide
  modified_base 89: mod_base = OTHER; note = 2'-O-methyl modified nucleotide
  modified_base 90: mod_base = OTHER; note = 2'-O-methyl modified nucleotide
  modified_base 91: mod_base = OTHER; note = 2'-O-methyl modified nucleotide
  modified_base 92: mod_base = OTHER; note = 2'-O-methyl modified nucleotide
  modified_base 93: mod_base = OTHER; note = 2'-O-methyl modified nucleotide
  modified_base 94: mod_base = OTHER; note = 2'-O-methyl modified nucleotide
  modified_base 95: mod_base = OTHER; note = 2'-O-methyl modified nucleotide
  modified_base 96: mod_base = OTHER; note = 2'-O-methyl modified nucleotide
  modified_base 120: mod_base = OTHER; note = Nucleotide with phosphorothioate linkage
  modified_base 121: mod_base = OTHER; note = 2'-O-methyl modified nucleotide with phosphorothioate linkage
  modified_base 122: mod_base = OTHER; note = 2'-O-methyl modified nucleotide with phosphorothioate linkage
  modified_base 123: mod_base = OTHER; note = 2'-O-methyl modified nucleotide
actcacgctggatagcctccgttttagagctagaaatagcaagttaaaataaggctagtccgttatcaacttgaaaaagtggcaccgagtcggtgctctggcctggataaccggctatccagc

SEQ ID NO: 17664 - RNA, 122 nt, synthetic construct
  source 1..122: mol_type = other RNA
  modified_base 1: mod_base = OTHER; note = 2'-O-methyl modified nucleotide with phosphorothioate linkage
  modified_base 2: mod_base = OTHER; note = 2'-O-methyl modified nucleotide with phosphorothioate linkage
  modified_base 3: mod_base = OTHER; note = 2'-O-methyl modified nucleotide with phosphorothioate linkage
  modified_base 29: mod_base = OTHER; note = 2'-O-methyl modified nucleotide
  modified_base 30: mod_base = OTHER; note = 2'-O-methyl modified nucleotide
  modified_base 31: mod_base = OTHER; note = 2'-O-methyl modified nucleotide
  modified_base 32: mod_base = OTHER; note = 2'-O-methyl modified nucleotide
  modified_base 33: mod_base = OTHER; note = 2'-O-methyl modified nucleotide
  modified_base 34: mod_base = OTHER; note = 2'-O-methyl modified nucleotide
  modified_base 35: mod_base = OTHER; note = 2'-O-methyl modified nucleotide
  modified_base 36: mod_base = OTHER; note = 2'-O-methyl modified nucleotide
  modified_base 37: mod_base = OTHER; note = 2'-O-methyl modified nucleotide
  modified_base 38: mod_base = OTHER; note = 2'-O-methyl modified nucleotide
  modified_base 39: mod_base = OTHER; note = 2'-O-methyl modified nucleotide
  modified_base 40: mod_base = OTHER; note = 2'-O-methyl modified nucleotide
  modified_base 69: mod_base = OTHER; note = 2'-O-methyl modified nucleotide
  modified_base 70: mod_base = OTHER; note = 2'-O-methyl modified nucleotide
  modified_base 71: mod_base = OTHER; note = 2'-O-methyl modified nucleotide
  modified_base 72: mod_base = OTHER; note = 2'-O-methyl modified nucleotide
  modified_base 73: mod_base = OTHER; note = 2'-O-methyl modified nucleotide
  modified_base 74: mod_base = OTHER; note = 2'-O-methyl modified nucleotide
  modified_base 75: mod_base = OTHER; note = 2'-O-methyl modified nucleotide
  modified_base 76: mod_base = OTHER; note = 2'-O-methyl modified nucleotide
  modified_base 77: mod_base = OTHER; note = 2'-O-methyl modified nucleotide
  modified_base 78: mod_base = OTHER; note = 2'-O-methyl modified nucleotide
  modified_base 79: mod_base = OTHER; note = 2'-O-methyl modified nucleotide
  modified_base 80: mod_base = OTHER; note = 2'-O-methyl modified nucleotide
  modified_base 81: mod_base = OTHER; note = 2'-O-methyl modified nucleotide
  modified_base 82: mod_base = OTHER; note = 2'-O-methyl modified nucleotide
  modified_base 83: mod_base = OTHER; note = 2'-O-methyl modified nucleotide
  modified_base 84: mod_base = OTHER; note = 2'-O-methyl modified nucleotide
  modified_base 85: mod_base = OTHER; note = 2'-O-methyl modified nucleotide
  modified_base 86: mod_base = OTHER; note = 2'-O-methyl modified nucleotide
  modified_base 87: mod_base = OTHER; note = 2'-O-methyl modified nucleotide
  modified_base 88: mod_base = OTHER; note = 2'-O-methyl modified nucleotide
  modified_base 89: mod_base = OTHER; note = 2'-O-methyl modified nucleotide
  modified_base 90: mod_base = OTHER; note = 2'-O-methyl modified nucleotide
  modified_base 91: mod_base = OTHER; note = 2'-O-methyl modified nucleotide
  modified_base 92: mod_base = OTHER; note = 2'-O-methyl modified nucleotide
  modified_base 93: mod_base = OTHER; note = 2'-O-methyl modified nucleotide
  modified_base 94: mod_base = OTHER; note = 2'-O-methyl modified nucleotide
  modified_base 95: mod_base = OTHER; note = 2'-O-methyl modified nucleotide
  modified_base 96: mod_base = OTHER; note = 2'-O-methyl modified nucleotide
  modified_base 119: mod_base = OTHER; note = Nucleotide with phosphorothioate linkage
  modified_base 120: mod_base = OTHER; note = 2'-O-methyl modified nucleotide with phosphorothioate linkage
  modified_base 121: mod_base = OTHER; note = 2'-O-methyl modified nucleotide with phosphorothioate linkage
  modified_base 122: mod_base = OTHER; note = 2'-O-methyl modified nucleotide
actcacgctggatagcctccgttttagagctagaaatagcaagttaaaataaggctagtccgttatcaacttgaaaaagtggcaccgagtcggtgctctggcctggataaccggctatccag

SEQ ID NO: 17665 - RNA, 121 nt, synthetic construct
  source 1..121: mol_type = other RNA
  modified_base 1: mod_base = OTHER; note = 2'-O-methyl modified nucleotide with phosphorothioate linkage
  modified_base 2: mod_base = OTHER; note = 2'-O-methyl modified nucleotide with phosphorothioate linkage
  modified_base 3: mod_base = OTHER; note = 2'-O-methyl modified nucleotide with phosphorothioate linkage
  modified_base 29: mod_base = OTHER; note = 2'-O-methyl modified nucleotide
  modified_base 30: mod_base = OTHER; note = 2'-O-methyl modified nucleotide
  modified_base 31: mod_base = OTHER; note = 2'-O-methyl modified nucleotide
  modified_base 32: mod_base = OTHER; note = 2'-O-methyl modified nucleotide
  modified_base 33: mod_base = OTHER; note = 2'-O-methyl modified nucleotide
  modified_base 34: mod_base = OTHER; note = 2'-O-methyl modified nucleotide
  modified_base 35: mod_base = OTHER; note = 2'-O-methyl modified nucleotide
  modified_base 36: mod_base = OTHER; note = 2'-O-methyl modified nucleotide
  modified_base 37: mod_base = OTHER; note = 2'-O-methyl modified nucleotide
  modified_base 38: mod_base = OTHER; note = 2'-O-methyl modified nucleotide
  modified_base 39: mod_base = OTHER; note = 2'-O-methyl modified nucleotide
  modified_base 40: mod_base = OTHER; note = 2'-O-methyl modified nucleotide
  modified_base 69: mod_base = OTHER; note = 2'-O-methyl modified nucleotide
  modified_base 70: mod_base = OTHER; note = 2'-O-methyl modified nucleotide
  modified_base 71: mod_base = OTHER; note = 2'-O-methyl modified nucleotide
  modified_base 72: mod_base = OTHER; note = 2'-O-methyl modified nucleotide
  modified_base 73: mod_base = OTHER; note = 2'-O-methyl modified nucleotide
  modified_base 74: mod_base = OTHER; note = 2'-O-methyl modified nucleotide
  modified_base 75: mod_base = OTHER; note = 2'-O-methyl modified nucleotide
  modified_base 76: mod_base = OTHER; note = 2'-O-methyl modified nucleotide
  modified_base 77: mod_base = OTHER; note = 2'-O-methyl modified nucleotide
  modified_base 78: mod_base = OTHER; note = 2'-O-methyl modified nucleotide
  modified_base 79: mod_base = OTHER; note = 2'-O-methyl modified nucleotide
  modified_base 80: mod_base = OTHER; note = 2'-O-methyl modified nucleotide
  modified_base 81: mod_base = OTHER; note = 2'-O-methyl modified nucleotide
  modified_base 82: mod_base = OTHER; note = 2'-O-methyl modified nucleotide
  modified_base 83: mod_base = OTHER; note = 2'-O-methyl modified nucleotide
  modified_base 84: mod_base = OTHER; note = 2'-O-methyl modified nucleotide
  modified_base 85: mod_base = OTHER; note = 2'-O-methyl modified nucleotide
  modified_base 86: mod_base = OTHER; note = 2'-O-methyl modified nucleotide
  modified_base 87: mod_base = OTHER; note = 2'-O-methyl modified nucleotide
  modified_base 88: mod_base = OTHER; note = 2'-O-methyl modified nucleotide
  modified_base 89: mod_base = OTHER; note = 2'-O-methyl modified nucleotide
  modified_base 90: mod_base = OTHER; note = 2'-O-methyl modified nucleotide
  modified_base 91: mod_base = OTHER; note = 2'-O-methyl modified nucleotide
  modified_base 92: mod_base = OTHER; note = 2'-O-methyl modified nucleotide
  modified_base 93: mod_base = OTHER; note = 2'-O-methyl modified nucleotide
  modified_base 94: mod_base = OTHER; note = 2'-O-methyl modified nucleotide
  modified_base 95: mod_base = OTHER; note = 2'-O-methyl modified nucleotide
  modified_base 96: mod_base = OTHER; note = 2'-O-methyl modified nucleotide
  modified_base 118: mod_base = OTHER; note = Nucleotide with phosphorothioate linkage
  modified_base 119: mod_base = OTHER; note = 2'-O-methyl modified nucleotide with phosphorothioate linkage
  modified_base 120: mod_base = OTHER; note = 2'-O-methyl modified nucleotide with phosphorothioate linkage
  modified_base 121: mod_base = OTHER; note = 2'-O-methyl modified nucleotide
actcacgctggatagcctccgttttagagctagaaatagcaagttaaaataaggctagtccgttatcaacttgaaaaagtggcaccgagtcggtgctctggcctggataaccggctatcca

SEQ ID NO: 17666 - RNA, 120 nt, synthetic construct
  source 1..120: mol_type = other RNA
  modified_base 1: mod_base = OTHER; note = 2'-O-methyl modified nucleotide with phosphorothioate linkage
  modified_base 2: mod_base = OTHER; note = 2'-O-methyl modified nucleotide with phosphorothioate linkage
  modified_base 3: mod_base = OTHER; note = 2'-O-methyl modified nucleotide with phosphorothioate linkage
  modified_base 29: mod_base = OTHER; note = 2'-O-methyl modified nucleotide
  modified_base 30: mod_base = OTHER; note = 2'-O-methyl modified nucleotide
  modified_base 31: mod_base = OTHER; note = 2'-O-methyl modified nucleotide
  modified_base 32: mod_base = OTHER; note = 2'-O-methyl modified nucleotide
  modified_base 33: mod_base = OTHER; note = 2'-O-methyl modified nucleotide
  modified_base 34: mod_base = OTHER; note = 2'-O-methyl modified nucleotide
  modified_base 35: mod_base = OTHER; note = 2'-O-methyl modified nucleotide
  modified_base 36: mod_base = OTHER; note = 2'-O-methyl modified nucleotide
  modified_base 37: mod_base = OTHER; note = 2'-O-methyl modified nucleotide
  modified_base 38: mod_base = OTHER; note = 2'-O-methyl modified nucleotide
  modified_base 39: mod_base = OTHER; note = 2'-O-methyl modified nucleotide
  modified_base 40: mod_base = OTHER; note = 2'-O-methyl modified nucleotide
  modified_base 69: mod_base = OTHER; note = 2'-O-methyl modified nucleotide
  modified_base 70: mod_base = OTHER; note = 2'-O-methyl modified nucleotide
  modified_base 71: mod_base = OTHER; note = 2'-O-methyl modified nucleotide
  modified_base 72: mod_base = OTHER; note = 2'-O-methyl modified nucleotide
  modified_base 73: mod_base = OTHER; note = 2'-O-methyl modified nucleotide
  modified_base 74: mod_base = OTHER; note = 2'-O-methyl modified nucleotide
  modified_base 75: mod_base = OTHER; note = 2'-O-methyl modified nucleotide
  modified_base 76: mod_base = OTHER; note = 2'-O-methyl modified nucleotide
  modified_base 77: mod_base = OTHER; note = 2'-O-methyl modified nucleotide
  modified_base 78: mod_base = OTHER; note = 2'-O-methyl modified nucleotide
  modified_base 79: mod_base = OTHER; note = 2'-O-methyl modified nucleotide
  modified_base 80: mod_base = OTHER; note = 2'-O-methyl modified nucleotide
  modified_base 81: mod_base = OTHER; note = 2'-O-methyl modified nucleotide
  modified_base 82: mod_base = OTHER; note = 2'-O-methyl modified nucleotide
  modified_base 83: mod_base = OTHER; note = 2'-O-methyl modified nucleotide
  modified_base 84: mod_base = OTHER; note = 2'-O-methyl modified nucleotide
  modified_base 85: mod_base = OTHER; note = 2'-O-methyl modified nucleotide
  modified_base 86: mod_base = OTHER; note = 2'-O-methyl modified nucleotide
  modified_base 87: mod_base = OTHER; note = 2'-O-methyl modified nucleotide
  modified_base 88: mod_base = OTHER; note = 2'-O-methyl modified nucleotide
  modified_base 89: mod_base = OTHER; note = 2'-O-methyl modified nucleotide
  modified_base 90: mod_base = OTHER; note = 2'-O-methyl modified nucleotide
  modified_base 91: mod_base = OTHER; note = 2'-O-methyl modified nucleotide
  modified_base 92: mod_base = OTHER; note = 2'-O-methyl modified nucleotide
  modified_base 93: mod_base = OTHER; note = 2'-O-methyl modified nucleotide
  modified_base 94: mod_base = OTHER; note = 2'-O-methyl modified nucleotide
  modified_base 95: mod_base = OTHER; note = 2'-O-methyl modified nucleotide
  modified_base 96: mod_base = OTHER; note = 2'-O-methyl modified nucleotide
  modified_base 117: mod_base = OTHER; note = Nucleotide with phosphorothioate linkage
  modified_base 118: mod_base = OTHER; note = 2'-O-methyl modified nucleotide with phosphorothioate linkage
  modified_base 119: mod_base = OTHER; note = 2'-O-methyl modified nucleotide with phosphorothioate linkage
  modified_base 120: mod_base = OTHER; note = 2'-O-methyl modified nucleotide
actcacgctggatagcctccgttttagagctagaaatagcaagttaaaataaggctagtccgttatcaacttgaaaaagtggcaccgagtcggtgctctggcctggataaccggctatcc

SEQ ID NO: 17667 - RNA, 127 nt, synthetic construct
  source 1..127: mol_type = other RNA
  modified_base 1: mod_base = OTHER; note = 2'-O-methyl modified nucleotide with phosphorothioate linkage
  modified_base 2: mod_base = OTHER; note = 2'-O-methyl modified nucleotide with phosphorothioate linkage
  modified_base 3: mod_base = OTHER; note = 2'-O-methyl modified nucleotide with phosphorothioate linkage
  modified_base 29: mod_base = OTHER; note = 2'-O-methyl modified nucleotide
  modified_base 30: mod_base = OTHER; note = 2'-O-methyl modified nucleotide
  modified_base 31: mod_base = OTHER; note = 2'-O-methyl modified nucleotide
  modified_base 32: mod_base = OTHER; note = 2'-O-methyl modified nucleotide
  modified_base 33: mod_base = OTHER; note = 2'-O-methyl modified nucleotide
  modified_base 34: mod_base = OTHER; note = 2'-O-methyl modified nucleotide
  modified_base 35: mod_base = OTHER; note = 2'-O-methyl modified nucleotide
  modified_base 36: mod_base = OTHER; note = 2'-O-methyl modified nucleotide
  modified_base 37: mod_base = OTHER; note = 2'-O-methyl modified nucleotide
  modified_base 38: mod_base = OTHER; note = 2'-O-methyl modified nucleotide
  modified_base 39: mod_base = OTHER; note = 2'-O-methyl modified nucleotide
  modified_base 40: mod_base = OTHER; note = 2'-O-methyl modified nucleotide
  modified_base 69: mod_base = OTHER; note = 2'-O-methyl modified nucleotide
  modified_base 70: mod_base = OTHER; note = 2'-O-methyl modified nucleotide
  modified_base 71: mod_base = OTHER; note = 2'-O-methyl modified nucleotide
  modified_base 72: mod_base = OTHER; note = 2'-O-methyl modified nucleotide
  modified_base 73: mod_base = OTHER; note = 2'-O-methyl modified nucleotide
  modified_base 74: mod_base = OTHER; note = 2'-O-methyl modified nucleotide
  modified_base 75: mod_base = OTHER; note = 2'-O-methyl modified nucleotide
  modified_base 76: mod_base = OTHER; note = 2'-O-methyl modified nucleotide
  modified_base 77: mod_base = OTHER; note = 2'-O-methyl modified nucleotide
  modified_base 78: mod_base = OTHER; note = 2'-O-methyl modified nucleotide
  modified_base 79: mod_base = OTHER; note = 2'-O-methyl modified nucleotide
  modified_base 80: mod_base = OTHER; note = 2'-O-methyl modified nucleotide
  modified_base 81: mod_base = OTHER; note = 2'-O-methyl modified nucleotide
  modified_base 82: mod_base = OTHER; note = 2'-O-methyl modified nucleotide
  modified_base 83: mod_base = OTHER; note = 2'-O-methyl modified nucleotide
  modified_base 84: mod_base = OTHER; note = 2'-O-methyl modified nucleotide
  modified_base 85: mod_base = OTHER; note = 2'-O-methyl modified nucleotide
  modified_base 86: mod_base = OTHER; note = 2'-O-methyl modified nucleotide
  modified_base 87: mod_base = OTHER; note = 2'-O-methyl modified nucleotide
  modified_base 88: mod_base = OTHER; note = 2'-O-methyl modified nucleotide
  modified_base 89: mod_base = OTHER; note = 2'-O-methyl modified nucleotide
  modified_base 90: mod_base = OTHER; note = 2'-O-methyl modified nucleotide
  modified_base 91: mod_base = OTHER; note = 2'-O-methyl modified nucleotide
  modified_base 92: mod_base = OTHER; note = 2'-O-methyl modified nucleotide
  modified_base 93: mod_base = OTHER; note = 2'-O-methyl modified nucleotide
  modified_base 94: mod_base = OTHER; note = 2'-O-methyl modified nucleotide
  modified_base 95: mod_base = OTHER; note = 2'-O-methyl modified nucleotide
  modified_base 96: mod_base = OTHER; note = 2'-O-methyl modified nucleotide
  modified_base 124: mod_base = OTHER; note = Nucleotide with phosphorothioate linkage
  modified_base 125: mod_base = OTHER; note = 2'-O-methyl modified nucleotide with phosphorothioate linkage
  modified_base 126: mod_base = OTHER; note = 2'-O-methyl modified nucleotide with phosphorothioate linkage
  modified_base 127: mod_base = OTHER; note = 2'-O-methyl modified nucleotide
actcacgctggatagcctccgttttagagctagaaatagcaagttaaaataaggctagtccgttatcaacttgaaaaagtggcaccgagtcggtgctttctggcctggataaccggctatccagcgt

SEQ ID NO: 17668 - RNA, 126 nt, synthetic construct
  source 1..126: mol_type = other RNA
  modified_base 1: mod_base = OTHER; note = 2'-O-methyl modified nucleotide with phosphorothioate linkage
  modified_base 2: mod_base = OTHER; note = 2'-O-methyl modified nucleotide with phosphorothioate linkage
  modified_base 3: mod_base = OTHER; note = 2'-O-methyl modified nucleotide with phosphorothioate linkage
  modified_base 29: mod_base = OTHER; note = 2'-O-methyl modified nucleotide
  modified_base 30: mod_base = OTHER; note = 2'-O-methyl modified nucleotide
  modified_base 31: mod_base = OTHER; note = 2'-O-methyl modified nucleotide
  modified_base 32: mod_base = OTHER; note = 2'-O-methyl modified nucleotide
  modified_base 33: mod_base = OTHER; note = 2'-O-methyl modified nucleotide
  modified_base 34: mod_base = OTHER; note = 2'-O-methyl modified nucleotide
  modified_base 35: mod_base = OTHER; note = 2'-O-methyl modified nucleotide
  modified_base 36: mod_base = OTHER; note = 2'-O-methyl modified nucleotide
  modified_base 37: mod_base = OTHER; note = 2'-O-methyl modified nucleotide
  modified_base 38: mod_base = OTHER; note = 2'-O-methyl modified nucleotide
  modified_base 39: mod_base = OTHER; note = 2'-O-methyl modified nucleotide
  modified_base 40: mod_base = OTHER; note = 2'-O-methyl modified nucleotide
  modified_base 69: mod_base = OTHER; note = 2'-O-methyl modified nucleotide
  modified_base 70: mod_base = OTHER; note = 2'-O-methyl modified nucleotide
  modified_base 71: mod_base = OTHER; note = 2'-O-methyl modified nucleotide
  modified_base 72: mod_base = OTHER; note = 2'-O-methyl modified nucleotide
  modified_base 73: mod_base = OTHER; note = 2'-O-methyl modified nucleotide
  modified_base 74: mod_base = OTHER; note = 2'-O-methyl modified nucleotide
  modified_base 75: mod_base = OTHER; note = 2'-O-methyl modified nucleotide
  modified_base 76: mod_base = OTHER; note = 2'-O-methyl modified nucleotide
  modified_base 77: mod_base = OTHER; note = 2'-O-methyl modified nucleotide
  modified_base 78: mod_base = OTHER; note = 2'-O-methyl modified nucleotide
  modified_base 79: mod_base = OTHER; note = 2'-O-methyl modified nucleotide
  modified_base 80: mod_base = OTHER; note = 2'-O-methyl modified nucleotide
  modified_base 81: mod_base = OTHER; note = 2'-O-methyl modified nucleotide
  modified_base 82: mod_base = OTHER; note = 2'-O-methyl modified nucleotide
  modified_base 83: mod_base = OTHER; note = 2'-O-methyl modified nucleotide
  modified_base 84: mod_base = OTHER; note = 2'-O-methyl modified nucleotide
  modified_base 85: mod_base = OTHER; note = 2'-O-methyl modified nucleotide
  modified_base 86: mod_base = OTHER; note = 2'-O-methyl modified nucleotide
  modified_base 87: mod_base = OTHER; note = 2'-O-methyl modified nucleotide
  modified_base 88: mod_base = OTHER; note = 2'-O-methyl modified nucleotide
  modified_base 89: mod_base = OTHER; note = 2'-O-methyl modified nucleotide
  modified_base 90: mod_base = OTHER; note = 2'-O-methyl modified nucleotide
  modified_base 91: mod_base = OTHER; note = 2'-O-methyl modified nucleotide
  modified_base 92: mod_base = OTHER; note = 2'-O-methyl modified nucleotide
  modified_base 93: mod_base = OTHER; note = 2'-O-methyl modified nucleotide
  modified_base 94: mod_base = OTHER; note = 2'-O-methyl modified nucleotide
  modified_base 95: mod_base = OTHER; note = 2'-O-methyl modified nucleotide
  modified_base 96: mod_base = OTHER; note = 2'-O-methyl modified nucleotide
  modified_base 123: mod_base = OTHER; note = Nucleotide with phosphorothioate linkage
  modified_base 124: mod_base = OTHER; note = 2'-O-methyl modified nucleotide with phosphorothioate linkage
  modified_base 125: mod_base = OTHER; note = 2'-O-methyl modified nucleotide with phosphorothioate linkage
  modified_base 126: mod_base = OTHER; note = 2'-O-methyl modified nucleotide
actcacgctggatagcctccgttttagagctagaaatagcaagttaaaataaggctagtccgttatcaacttgaaaaagtggcaccgagtcggtgctttctggcctggataaccggctatccagcg

SEQ ID NO: 17669 - RNA, 125 nt, synthetic construct
  source 1..125: mol_type = other RNA
  modified_base 1: mod_base = OTHER; note = 2'-O-methyl modified nucleotide with phosphorothioate linkage
  modified_base 2: mod_base = OTHER; note = 2'-O-methyl modified nucleotide with phosphorothioate linkage
  modified_base 3: mod_base = OTHER; note = 2'-O-methyl modified nucleotide with phosphorothioate linkage
  modified_base 29: mod_base = OTHER; note = 2'-O-methyl modified nucleotide
  modified_base 30: mod_base = OTHER; note = 2'-O-methyl modified nucleotide
  modified_base 31: mod_base = OTHER; note = 2'-O-methyl modified nucleotide
  modified_base 32: mod_base = OTHER; note = 2'-O-methyl modified nucleotide
  modified_base 33: mod_base = OTHER; note = 2'-O-methyl modified nucleotide
  modified_base 34: mod_base = OTHER; note = 2'-O-methyl modified nucleotide
  modified_base 35: mod_base = OTHER; note = 2'-O-methyl modified nucleotide
  modified_base 36: mod_base = OTHER; note = 2'-O-methyl modified nucleotide
  modified_base 37: mod_base = OTHER; note = 2'-O-methyl modified nucleotide
  modified_base 38: mod_base = OTHER; note = 2'-O-methyl modified nucleotide
  modified_base 39: mod_base = OTHER; note = 2'-O-methyl modified nucleotide
  modified_base 40: mod_base = OTHER; note = 2'-O-methyl modified nucleotide
  modified_base 69: mod_base = OTHER; note = 2'-O-methyl modified nucleotide
  modified_base 70: mod_base = OTHER; note = 2'-O-methyl modified nucleotide
  modified_base 71: mod_base = OTHER; note = 2'-O-methyl modified nucleotide
  modified_base 72: mod_base = OTHER; note = 2'-O-methyl modified nucleotide
  modified_base 73: mod_base = OTHER; note = 2'-O-methyl modified nucleotide
  modified_base 74: mod_base = OTHER; note = 2'-O-methyl modified nucleotide
  modified_base 75: mod_base = OTHER; note = 2'-O-methyl modified nucleotide
  modified_base 76: mod_base = OTHER; note = 2'-O-methyl modified nucleotide
  modified_base 77: mod_base = OTHER; note = 2'-O-methyl modified nucleotide
  modified_base 78: mod_base = OTHER; note = 2'-O-methyl modified nucleotide
  modified_base 79: mod_base = OTHER; note = 2'-O-methyl modified nucleotide
  modified_base 80: mod_base = OTHER; note = 2'-O-methyl modified nucleotide
  modified_base 81: mod_base = OTHER; note = 2'-O-methyl modified nucleotide
  modified_base 82: mod_base = OTHER; note = 2'-O-methyl modified nucleotide
  modified_base 83: mod_base = OTHER; note = 2'-O-methyl modified nucleotide
  modified_base 84: mod_base = OTHER; note = 2'-O-methyl modified nucleotide
  modified_base 85: mod_base = OTHER; note = 2'-O-methyl modified nucleotide
  modified_base 86: mod_base = OTHER; note = 2'-O-methyl modified nucleotide
  modified_base 87: mod_base = OTHER; note = 2'-O-methyl modified nucleotide
  modified_base 88: mod_base = OTHER; note = 2'-O-methyl modified nucleotide
  modified_base 89: mod_base = OTHER; note = 2'-O-methyl modified nucleotide
  modified_base 90: mod_base = OTHER; note = 2'-O-methyl modified nucleotide
  modified_base 91: mod_base = OTHER; note = 2'-O-methyl modified nucleotide
  modified_base 92: mod_base = OTHER; note = 2'-O-methyl modified nucleotide
  modified_base 93: mod_base = OTHER; note = 2'-O-methyl modified nucleotide
  modified_base 94: mod_base = OTHER; note = 2'-O-methyl modified nucleotide
  modified_base 95: mod_base = OTHER; note = 2'-O-methyl modified nucleotide
  modified_base 96: mod_base = OTHER; note = 2'-O-methyl modified nucleotide
  modified_base 122: mod_base = OTHER; note = Nucleotide with phosphorothioate linkage
  modified_base 123: mod_base = OTHER; note = 2'-O-methyl modified nucleotide with phosphorothioate linkage
  modified_base 124: mod_base = OTHER; note = 2'-O-methyl modified nucleotide with phosphorothioate linkage
  modified_base 125: mod_base = OTHER; note = 2'-O-methyl modified nucleotide
actcacgctggatagcctccgttttagagctagaaatagcaagttaaaataaggctagtccgttatcaacttgaaaaagtggcaccgagtcggtgctttctggcctggataaccggctatccagc

SEQ ID NO: 17670 - RNA, 124 nt, synthetic construct
  source 1..124: mol_type = other RNA
  modified_base 1: mod_base = OTHER; note = 2'-O-methyl modified nucleotide with phosphorothioate linkage
  modified_base 2: mod_base = OTHER; note = 2'-O-methyl modified nucleotide with phosphorothioate linkage
  modified_base 3: mod_base = OTHER; note = 2'-O-methyl modified nucleotide with phosphorothioate linkage
  modified_base 29: mod_base = OTHER; note = 2'-O-methyl modified nucleotide
  modified_base 30: mod_base = OTHER; note = 2'-O-methyl modified nucleotide
  modified_base 31: mod_base = OTHER; note = 2'-O-methyl modified nucleotide
  modified_base 32: mod_base = OTHER; note = 2'-O-methyl modified nucleotide
  modified_base 33: mod_base = OTHER; note = 2'-O-methyl modified nucleotide
  modified_base 34: mod_base = OTHER; note = 2'-O-methyl modified nucleotide
  modified_base 35: mod_base = OTHER; note = 2'-O-methyl modified nucleotide
  modified_base 36: mod_base = OTHER; note = 2'-O-methyl modified nucleotide
  modified_base 37: mod_base = OTHER; note = 2'-O-methyl modified nucleotide
  modified_base 38: mod_base = OTHER; note = 2'-O-methyl modified nucleotide
  modified_base 39: mod_base = OTHER; note = 2'-O-methyl modified nucleotide
  modified_base 40: mod_base = OTHER; note = 2'-O-methyl modified nucleotide
  modified_base 69: mod_base = OTHER; note = 2'-O-methyl modified nucleotide
  modified_base 70: mod_base = OTHER; note = 2'-O-methyl modified nucleotide
  modified_base 71: mod_base = OTHER; note = 2'-O-methyl modified nucleotide
  modified_base 72: mod_base = OTHER; note = 2'-O-methyl modified nucleotide
  modified_base 73: mod_base = OTHER; note = 2'-O-methyl modified nucleotide
  modified_base 74: mod_base = OTHER; note = 2'-O-methyl modified nucleotide
  modified_base 75: mod_base = OTHER; note = 2'-O-methyl modified nucleotide
  modified_base 76: mod_base = OTHER; note = 2'-O-methyl modified nucleotide
  modified_base 77: mod_base = OTHER; note = 2'-O-methyl modified nucleotide
  modified_base 78: mod_base = OTHER; note = 2'-O-methyl modified nucleotide
  modified_base 79: mod_base = OTHER; note = 2'-O-methyl modified nucleotide
  modified_base 80: mod_base = OTHER; note = 2'-O-methyl modified nucleotide
  modified_base 81: mod_base = OTHER; note = 2'-O-methyl modified nucleotide
  modified_base 82: mod_base = OTHER; note = 2'-O-methyl modified nucleotide
  modified_base 83: mod_base = OTHER; note = 2'-O-methyl modified nucleotide
  modified_base 84: mod_base = OTHER; note = 2'-O-methyl modified nucleotide
  modified_base 85: mod_base = OTHER; note = 2'-O-methyl modified nucleotide
  modified_base 86: mod_base = OTHER; note = 2'-O-methyl modified nucleotide
  modified_base 87: mod_base = OTHER; note = 2'-O-methyl modified nucleotide
  modified_base 88: mod_base = OTHER; note = 2'-O-methyl modified nucleotide
  modified_base 89: mod_base = OTHER; note = 2'-O-methyl modified nucleotide
  modified_base 90: mod_base = OTHER; note = 2'-O-methyl modified nucleotide
  modified_base 91: mod_base = OTHER; note = 2'-O-methyl modified nucleotide
  modified_base 92: mod_base = OTHER; note = 2'-O-methyl modified nucleotide
  modified_base 93: mod_base = OTHER; note = 2'-O-methyl modified nucleotide
  modified_base 94: mod_base = OTHER; note = 2'-O-methyl modified nucleotide
  modified_base 95: mod_base = OTHER; note = 2'-O-methyl modified nucleotide
  modified_base 96: mod_base = OTHER; note = 2'-O-methyl modified nucleotide
  modified_base 121: mod_base = OTHER; note = Nucleotide with phosphorothioate linkage
  modified_base 122: mod_base = OTHER; note = 2'-O-methyl modified nucleotide with phosphorothioate linkage
  modified_base 123: mod_base = OTHER; note = 2'-O-methyl modified nucleotide with phosphorothioate linkage
  modified_base 124: mod_base = OTHER; note = 2'-O-methyl modified nucleotide
actcacgctggatagcctccgttttagagctagaaatagcaagttaaaataaggctagtccgttatcaacttgaaaaagtggcaccgagtcggtgctttctggcctggataaccggctatccag

SEQ ID NO: 17671 - RNA, 123 nt, synthetic construct
  source 1..123: mol_type = other RNA
  modified_base 1: mod_base = OTHER; note = 2'-O-methyl modified nucleotide with phosphorothioate linkage
  modified_base 2: mod_base = OTHER; note = 2'-O-methyl modified nucleotide with phosphorothioate linkage
  modified_base 3: mod_base = OTHER; note = 2'-O-methyl modified nucleotide with phosphorothioate linkage
  modified_base 29: mod_base = OTHER; note = 2'-O-methyl modified nucleotide
  modified_base 30: mod_base = OTHER; note = 2'-O-methyl modified nucleotide
  modified_base 31: mod_base = OTHER; note = 2'-O-methyl modified nucleotide
  modified_base 32: mod_base = OTHER; note = 2'-O-methyl modified nucleotide
  modified_base 33: mod_base = OTHER; note = 2'-O-methyl modified nucleotide
  modified_base 34: mod_base = OTHER; note = 2'-O-methyl modified nucleotide
  modified_base 35: mod_base = OTHER; note = 2'-O-methyl modified nucleotide
  modified_base 36: mod_base = OTHER; note = 2'-O-methyl modified nucleotide
  modified_base 37: mod_base = OTHER; note = 2'-O-methyl modified nucleotide
  modified_base 38: mod_base = OTHER; note = 2'-O-methyl modified nucleotide
  modified_base 39: mod_base = OTHER; note = 2'-O-methyl modified nucleotide
  modified_base 40: mod_base = OTHER; note = 2'-O-methyl modified nucleotide
  modified_base 69: mod_base = OTHER; note = 2'-O-methyl modified nucleotide
  modified_base 70: mod_base = OTHER; note = 2'-O-methyl modified nucleotide
  modified_base 71: mod_base = OTHER; note = 2'-O-methyl modified nucleotide
  modified_base 72: mod_base = OTHER; note = 2'-O-methyl modified nucleotide
  modified_base 73: mod_base = OTHER; note = 2'-O-methyl modified nucleotide
  modified_base 74: mod_base = OTHER; note = 2'-O-methyl modified nucleotide
  modified_base 75: mod_base = OTHER; note = 2'-O-methyl modified nucleotide
  modified_base 76: mod_base = OTHER; note = 2'-O-methyl modified nucleotide
  modified_base 77: mod_base = OTHER; note = 2'-O-methyl modified nucleotide
  modified_base 78: mod_base = OTHER; note = 2'-O-methyl modified nucleotide
  modified_base 79: mod_base = OTHER; note = 2'-O-methyl modified nucleotide
  modified_base 80: mod_base = OTHER; note = 2'-O-methyl modified nucleotide
  modified_base 81: mod_base = OTHER; note = 2'-O-methyl modified nucleotide
  modified_base 82: mod_base = OTHER; note = 2'-O-methyl modified nucleotide
  modified_base 83: mod_base = OTHER; note = 2'-O-methyl modified nucleotide
  modified_base 84: mod_base = OTHER; note = 2'-O-methyl modified nucleotide
  modified_base 85: mod_base = OTHER; note = 2'-O-methyl modified nucleotide
  modified_base 86: mod_base = OTHER; note = 2'-O-methyl modified nucleotide
  modified_base 87: mod_base = OTHER; note = 2'-O-methyl modified nucleotide
  modified_base 88: mod_base = OTHER; note = 2'-O-methyl modified nucleotide
  modified_base 89: mod_base = OTHER; note = 2'-O-methyl modified nucleotide
  modified_base 90: mod_base = OTHER; note = 2'-O-methyl modified nucleotide
  modified_base 91: mod_base = OTHER; note = 2'-O-methyl modified nucleotide
  modified_base 92: mod_base = OTHER; note = 2'-O-methyl modified nucleotide
  modified_base 93: mod_base = OTHER; note = 2'-O-methyl modified nucleotide
  modified_base 94: mod_base = OTHER; note = 2'-O-methyl modified nucleotide
  modified_base 95: mod_base = OTHER; note = 2'-O-methyl modified nucleotide
  modified_base 96: mod_base = OTHER; note = 2'-O-methyl modified nucleotide
  modified_base 120: mod_base = OTHER; note = Nucleotide with phosphorothioate linkage
  modified_base 121: mod_base = OTHER; note = 2'-O-methyl modified nucleotide with phosphorothioate linkage
  modified_base 122: mod_base = OTHER; note = 2'-O-methyl modified nucleotide with phosphorothioate linkage
  modified_base 123: mod_base = OTHER; note = 2'-O-methyl modified nucleotide
actcacgctggatagcctccgttttagagctagaaatagcaagttaaaataaggctagtccgttatcaacttgaaaaagtggcaccgagtcggtgctttctggcctggataaccggctatcca

SEQ ID NO: 17672 - RNA, 122 nt, synthetic construct
  source 1..122: mol_type = other RNA
  modified_base 1: mod_base = OTHER; note = 2'-O-methyl modified nucleotide with phosphorothioate linkage
  modified_base 2: mod_base = OTHER; note = 2'-O-methyl modified nucleotide with phosphorothioate linkage
  modified_base 3: mod_base = OTHER; note = 2'-O-methyl modified nucleotide with phosphorothioate linkage
  modified_base 29: mod_base = OTHER; note = 2'-O-methyl modified nucleotide
  modified_base 30: mod_base = OTHER; note = 2'-O-methyl modified nucleotide
  modified_base 31: mod_base = OTHER; note = 2'-O-methyl modified nucleotide
  modified_base 32: mod_base = OTHER; note = 2'-O-methyl modified nucleotide
  modified_base 33: mod_base = OTHER; note = 2'-O-methyl modified nucleotide
  modified_base 34: mod_base = OTHER; note = 2'-O-methyl modified nucleotide
  modified_base 35: mod_base = OTHER; note = 2'-O-methyl modified nucleotide
  modified_base 36: mod_base = OTHER; note = 2'-O-methyl modified nucleotide
  modified_base 37: mod_base = OTHER; note = 2'-O-methyl modified nucleotide
  modified_base 38: mod_base = OTHER; note = 2'-O-methyl modified nucleotide
  modified_base 39: mod_base = OTHER; note = 2'-O-methyl modified nucleotide
  modified_base 40: mod_base = OTHER; note = 2'-O-methyl modified nucleotide
  modified_base 69: mod_base = OTHER; note = 2'-O-methyl modified nucleotide
  modified_base 70: mod_base = OTHER; note = 2'-O-methyl modified nucleotide
  modified_base 71: mod_base = OTHER; note = 2'-O-methyl modified nucleotide
  modified_base 72: mod_base = OTHER; note = 2'-O-methyl modified nucleotide
  modified_base 73: mod_base = OTHER; note = 2'-O-methyl modified nucleotide
  modified_base 74: mod_base = OTHER; note = 2'-O-methyl modified nucleotide
  modified_base 75: mod_base = OTHER; note = 2'-O-methyl modified nucleotide
  modified_base 76: mod_base = OTHER; note = 2'-O-methyl modified nucleotide
  modified_base 77: mod_base = OTHER; note = 2'-O-methyl modified nucleotide
  modified_base 78: mod_base = OTHER; note = 2'-O-methyl modified nucleotide
  modified_base 79: mod_base = OTHER; note = 2'-O-methyl modified nucleotide
  modified_base 80: mod_base = OTHER; note = 2'-O-methyl modified nucleotide
  modified_base 81: mod_base = OTHER; note = 2'-O-methyl modified nucleotide
  modified_base 82: mod_base = OTHER; note = 2'-O-methyl modified nucleotide
  modified_base 83: mod_base = OTHER; note = 2'-O-methyl modified nucleotide
  modified_base 84: mod_base = OTHER; note = 2'-O-methyl modified nucleotide
  modified_base 85: mod_base = OTHER; note = 2'-O-methyl modified nucleotide
  modified_base 86: mod_base = OTHER; note = 2'-O-methyl modified nucleotide
  modified_base 87: mod_base = OTHER; note = 2'-O-methyl modified nucleotide
  modified_base 88: mod_base = OTHER; note = 2'-O-methyl modified nucleotide
  modified_base 89: mod_base = OTHER; note = 2'-O-methyl modified nucleotide
  modified_base 90: mod_base = OTHER; note = 2'-O-methyl modified nucleotide
  modified_base 91: mod_base = OTHER; note = 2'-O-methyl modified nucleotide
  modified_base 92: mod_base = OTHER; note = 2'-O-methyl modified nucleotide
  modified_base 93: mod_base = OTHER; note = 2'-O-methyl modified nucleotide
  modified_base 94: mod_base = OTHER; note = 2'-O-methyl modified nucleotide
  modified_base 95: mod_base = OTHER; note = 2'-O-methyl modified nucleotide
  modified_base 96: mod_base = OTHER; note = 2'-O-methyl modified nucleotide
  modified_base 119: mod_base = OTHER; note = Nucleotide with phosphorothioate linkage
  modified_base 120: mod_base = OTHER; note = 2'-O-methyl modified nucleotide with phosphorothioate linkage
  modified_base 121: mod_base = OTHER; note = 2'-O-methyl modified nucleotide with phosphorothioate linkage
  modified_base 122: mod_base = OTHER; note = 2'-O-methyl modified nucleotide
actcacgctggatagcctccgttttagagctagaaatagcaagttaaaataaggctagtccgttatcaacttgaaaaagtggcaccgagtcggtgctttctggcctggataaccggctatcc

SEQ ID NO: 17673 - RNA, 129 nt, synthetic construct
  source 1..129: mol_type = other RNA
  modified_base 1: mod_base = OTHER; note = 2'-O-methyl modified nucleotide with phosphorothioate linkage
  modified_base 2: mod_base = OTHER; note = 2'-O-methyl modified nucleotide with phosphorothioate linkage
  modified_base 3: mod_base = OTHER; note = 2'-O-methyl modified nucleotide with phosphorothioate linkage
  modified_base 29: mod_base = OTHER; note = 2'-O-methyl modified nucleotide
  modified_base 30: mod_base = OTHER; note = 2'-O-methyl modified nucleotide
  modified_base 31: mod_base = OTHER; note = 2'-O-methyl modified nucleotide
  modified_base 32: mod_base = OTHER; note = 2'-O-methyl modified nucleotide
  modified_base 33: mod_base = OTHER; note = 2'-O-methyl modified nucleotide
  modified_base 34: mod_base = OTHER; note = 2'-O-methyl modified nucleotide
  modified_base 35: mod_base = OTHER; note = 2'-O-methyl modified nucleotide
  modified_base 36: mod_base = OTHER; note = 2'-O-methyl modified nucleotide
  modified_base 37: mod_base = OTHER; note = 2'-O-methyl modified nucleotide
  modified_base 38: mod_base = OTHER; note = 2'-O-methyl modified nucleotide
  modified_base 39: mod_base = OTHER; note = 2'-O-methyl modified nucleotide
  modified_base 40: mod_base = OTHER; note = 2'-O-methyl modified nucleotide
  modified_base 69: mod_base = OTHER; note = 2'-O-methyl modified nucleotide
  modified_base 70: mod_base = OTHER; note = 2'-O-methyl modified nucleotide
  modified_base 71: mod_base = OTHER; note = 2'-O-methyl modified nucleotide
  modified_base 72: mod_base = OTHER; note = 2'-O-methyl modified nucleotide
  modified_base 73: mod_base = OTHER; note = 2'-O-methyl modified nucleotide
  modified_base 74: mod_base = OTHER; note = 2'-O-methyl modified nucleotide
  modified_base 75: mod_base = OTHER; note = 2'-O-methyl modified nucleotide
  modified_base 76: mod_base = OTHER; note = 2'-O-methyl modified nucleotide
  modified_base 77: mod_base = OTHER; note = 2'-O-methyl modified nucleotide
  modified_base 78: mod_base = OTHER; note = 2'-O-methyl modified nucleotide
  modified_base 79: mod_base = OTHER; note = 2'-O-methyl modified nucleotide
  modified_base 80: mod_base = OTHER; note = 2'-O-methyl modified nucleotide
  modified_base 81: mod_base = OTHER; note = 2'-O-methyl modified nucleotide
  modified_base 82: mod_base = OTHER; note = 2'-O-methyl modified nucleotide
  modified_base 83: mod_base = OTHER; note = 2'-O-methyl modified nucleotide
  modified_base 84: mod_base = OTHER; note = 2'-O-methyl modified nucleotide
  modified_base 85: mod_base = OTHER; note = 2'-O-methyl modified nucleotide
  modified_base 86: mod_base = OTHER; note = 2'-O-methyl modified nucleotide
  modified_base 87: mod_base = OTHER; note = 2'-O-methyl modified nucleotide
  modified_base 88: mod_base = OTHER; note = 2'-O-methyl modified nucleotide
  modified_base 89: mod_base = OTHER; note = 2'-O-methyl modified nucleotide
  modified_base 90: mod_base = OTHER; note = 2'-O-methyl modified nucleotide
  modified_base 91: mod_base = OTHER; note = 2'-O-methyl modified nucleotide
  modified_base 92: mod_base = OTHER; note = 2'-O-methyl modified nucleotide
  modified_base 93: mod_base = OTHER; note = 2'-O-methyl modified nucleotide
  modified_base 94: mod_base = OTHER; note = 2'-O-methyl modified nucleotide
  modified_base 95: mod_base = OTHER; note = 2'-O-methyl modified nucleotide
  modified_base 96: mod_base = OTHER; note = 2'-O-methyl modified nucleotide
  modified_base 126: mod_base = OTHER; note = Nucleotide with phosphorothioate linkage
  modified_base 127: mod_base = OTHER; note = 2'-O-methyl modified nucleotide with phosphorothioate linkage
  modified_base 128: mod_base = OTHER; note = 2'-O-methyl modified nucleotide with phosphorothioate linkage
  modified_base 129: mod_base = OTHER; note = 2'-O-methyl modified nucleotide
actcacgctggatagcctccgttttagagctagaaatagcaagttaaaataaggctagtccgttatcaacttgaaaaagtggcaccgagtcggtgctctttctggcctggataaccggctatccagcgt

SEQ ID NO: 17674 - RNA, 128 nt, synthetic construct
  source 1..128: mol_type = other RNA
  modified_base 1: mod_base = OTHER; note = 2'-O-methyl modified nucleotide with phosphorothioate linkage
  modified_base 2: mod_base = OTHER; note = 2'-O-methyl modified nucleotide with phosphorothioate linkage
  modified_base 3: mod_base = OTHER; note = 2'-O-methyl modified nucleotide with phosphorothioate linkage
  modified_base 29: mod_base = OTHER; note = 2'-O-methyl modified nucleotide
  modified_base 30: mod_base = OTHER; note = 2'-O-methyl modified nucleotide
  modified_base 31: mod_base = OTHER; note = 2'-O-methyl modified nucleotide
  modified_base 32: mod_base = OTHER; note = 2'-O-methyl modified nucleotide
  modified_base 33: mod_base = OTHER; note = 2'-O-methyl modified nucleotide
  modified_base 34: mod_base = OTHER; note = 2'-O-methyl modified nucleotide
  modified_base 35: mod_base = OTHER; note = 2'-O-methyl modified nucleotide
  modified_base 36: mod_base = OTHER; note = 2'-O-methyl modified nucleotide
  modified_base 37: mod_base = OTHER; note = 2'-O-methyl modified nucleotide
  modified_base 38: mod_base = OTHER; note = 2'-O-methyl modified nucleotide
  modified_base 39: mod_base = OTHER; note = 2'-O-methyl modified nucleotide
  modified_base 40: mod_base = OTHER; note = 2'-O-methyl modified nucleotide
  modified_base 69: mod_base = OTHER; note = 2'-O-methyl modified nucleotide
  modified_base 70: mod_base = OTHER; note = 2'-O-methyl modified nucleotide
  modified_base 71: mod_base = OTHER; note = 2'-O-methyl modified nucleotide
  modified_base 72: mod_base = OTHER; note = 2'-O-methyl modified nucleotide
  modified_base 73: mod_base = OTHER; note = 2'-O-methyl modified nucleotide
  modified_base 74: mod_base = OTHER; note = 2'-O-methyl modified nucleotide
  modified_base 75: mod_base = OTHER; note = 2'-O-methyl modified nucleotide
  modified_base 76: mod_base = OTHER; note = 2'-O-methyl modified nucleotide
  modified_base 77: mod_base = OTHER; note = 2'-O-methyl modified nucleotide
  modified_base 78: mod_base = OTHER; note = 2'-O-methyl modified nucleotide
  modified_base 79: mod_base = OTHER; note = 2'-O-methyl modified nucleotide
  modified_base 80: mod_base = OTHER; note = 2'-O-methyl modified nucleotide
  modified_base 81: mod_base = OTHER; note = 2'-O-methyl modified nucleotide
  modified_base 82: mod_base = OTHER; note = 2'-O-methyl modified nucleotide
  modified_base 83: mod_base = OTHER; note = 2'-O-methyl modified nucleotide
  modified_base 84: mod_base = OTHER; note = 2'-O-methyl modified nucleotide
  modified_base 85: mod_base = OTHER; note = 2'-O-methyl modified nucleotide
  modified_base 86: mod_base = OTHER; note = 2'-O-methyl modified nucleotide
  modified_base 87: mod_base = OTHER; note = 2'-O-methyl modified nucleotide
  modified_base 88: mod_base = OTHER; note = 2'-O-methyl modified nucleotide
  modified_base 89: mod_base = OTHER; note = 2'-O-methyl modified nucleotide
  modified_base 90: mod_base = OTHER; note = 2'-O-methyl modified nucleotide
  modified_base 91: mod_base = OTHER; note = 2'-O-methyl modified nucleotide
  modified_base 92: mod_base = OTHER; note = 2'-O-methyl modified nucleotide
  modified_base 93: mod_base = OTHER; note = 2'-O-methyl modified nucleotide
  modified_base 94: mod_base = OTHER; note = 2'-O-methyl modified nucleotide
  modified_base 95: mod_base = OTHER; note = 2'-O-methyl modified nucleotide
  modified_base 96: mod_base = OTHER; note = 2'-O-methyl modified nucleotide
  modified_base 125: mod_base = OTHER; note = Nucleotide with phosphorothioate linkage
  modified_base 126: mod_base = OTHER; note = 2'-O-methyl modified nucleotide with phosphorothioate linkage
  modified_base 127: mod_base = OTHER; note = 2'-O-methyl modified nucleotide with phosphorothioate linkage
  modified_base 128: mod_base = OTHER; note = 2'-O-methyl modified nucleotide
actcacgctggatagcctccgttttagagctagaaatagcaagttaaaataaggctagtccgttatcaacttgaaaaagtggcaccgagtcggtgctctttctggcctggataaccggctatccagcg

SEQ ID NO: 17675 - RNA, 127 nt, synthetic construct
  source 1..127: mol_type = other RNA
  modified_base 1: mod_base = OTHER; note = 2'-O-methyl modified nucleotide with phosphorothioate linkage
  modified_base 2: mod_base = OTHER; note = 2'-O-methyl modified nucleotide with phosphorothioate linkage
  modified_base 3: mod_base = OTHER; note = 2'-O-methyl modified nucleotide with phosphorothioate linkage
  modified_base 29: mod_base = OTHER; note = 2'-O-methyl modified nucleotide
  modified_base 30: mod_base = OTHER; note = 2'-O-methyl modified nucleotide
  modified_base 31: mod_base = OTHER; note = 2'-O-methyl modified nucleotide
  modified_base 32: mod_base = OTHER; note = 2'-O-methyl modified nucleotide
  modified_base 33: mod_base = OTHER; note = 2'-O-methyl modified nucleotide
  modified_base 34: mod_base = OTHER; note = 2'-O-methyl modified nucleotide
  modified_base 35: mod_base = OTHER; note = 2'-O-methyl modified nucleotide
  modified_base 36: mod_base = OTHER; note = 2'-O-methyl modified nucleotide
  modified_base 37: mod_base = OTHER; note = 2'-O-methyl modified nucleotide
  modified_base 38: mod_base = OTHER; note = 2'-O-methyl modified nucleotide
  modified_base 39: mod_base = OTHER; note = 2'-O-methyl modified nucleotide
  modified_base 40: mod_base = OTHER; note = 2'-O-methyl modified nucleotide
  modified_base 69: mod_base = OTHER; note = 2'-O-methyl modified nucleotide
  modified_base 70: mod_base = OTHER; note = 2'-O-methyl modified nucleotide
  modified_base 71: mod_base = OTHER; note = 2'-O-methyl modified nucleotide
  modified_base 72: mod_base = OTHER; note = 2'-O-methyl modified nucleotide
  modified_base 73: mod_base = OTHER; note = 2'-O-methyl modified nucleotide
  modified_base 74: mod_base = OTHER; note = 2'-O-methyl modified nucleotide
  modified_base 75: mod_base = OTHER; note = 2'-O-methyl modified nucleotide
  modified_base 76: mod_base = OTHER; note = 2'-O-methyl modified nucleotide
  modified_base 77: mod_base = OTHER; note = 2'-O-methyl modified nucleotide
  modified_base 78: mod_base = OTHER; note = 2'-O-methyl modified nucleotide
  modified_base 79: mod_base = OTHER; note = 2'-O-methyl modified nucleotide
  modified_base 80: mod_base = OTHER; note = 2'-O-methyl modified nucleotide
  modified_base 81: mod_base = OTHER; note = 2'-O-methyl modified nucleotide
  modified_base 82: mod_base = OTHER; note = 2'-O-methyl modified nucleotide
  modified_base 83: mod_base = OTHER; note = 2'-O-methyl modified nucleotide
  modified_base 84: mod_base = OTHER; note = 2'-O-methyl modified nucleotide
  modified_base 85: mod_base = OTHER; note = 2'-O-methyl modified nucleotide
  modified_base 86: mod_base = OTHER; note = 2'-O-methyl modified nucleotide
  modified_base 87: mod_base = OTHER; note = 2'-O-methyl modified nucleotide
  modified_base 88: mod_base = OTHER; note = 2'-O-methyl modified nucleotide
  modified_base 89: mod_base = OTHER; note = 2'-O-methyl modified nucleotide
  modified_base 90: mod_base = OTHER; note = 2'-O-methyl modified nucleotide
  modified_base 91: mod_base = OTHER; note = 2'-O-methyl modified nucleotide
  modified_base 92: mod_base = OTHER; note = 2'-O-methyl modified nucleotide
  modified_base 93: mod_base = OTHER; note = 2'-O-methyl modified nucleotide
  modified_base 94: mod_base = OTHER; note = 2'-O-methyl modified nucleotide
  modified_base 95: mod_base = OTHER; note = 2'-O-methyl modified nucleotide
  modified_base 96: mod_base = OTHER; note = 2'-O-methyl modified nucleotide
  modified_base 124: mod_base = OTHER; note = Nucleotide with phosphorothioate linkage
  modified_base 125: mod_base = OTHER; note = 2'-O-methyl modified nucleotide with phosphorothioate linkage
  modified_base 126: mod_base = OTHER; note = 2'-O-methyl modified nucleotide with phosphorothioate linkage
  modified_base 127: mod_base = OTHER; note = 2'-O-methyl modified nucleotide
actcacgctggatagcctccgttttagagctagaaatagcaagttaaaataaggctagtccgttatcaacttgaaaaagtggcaccgagtcggtgctctttctggcctggataaccggctatccagc

SEQ ID NO: 17676 - RNA, 126 nt, synthetic construct
  source 1..126: mol_type = other RNA
  modified_base 1: mod_base = OTHER; note = 2'-O-methyl modified nucleotide with phosphorothioate linkage
  modified_base 2: mod_base = OTHER; note = 2'-O-methyl modified nucleotide with phosphorothioate linkage
  modified_base 3: mod_base = OTHER; note = 2'-O-methyl modified nucleotide with phosphorothioate linkage
  modified_base 29: mod_base = OTHER; note = 2'-O-methyl modified nucleotide
  modified_base 30: mod_base = OTHER; note = 2'-O-methyl modified nucleotide
  modified_base 31: mod_base = OTHER; note = 2'-O-methyl modified nucleotide
  modified_base 32: mod_base = OTHER; note = 2'-O-methyl modified nucleotide
  modified_base 33: mod_base = OTHER; note = 2'-O-methyl modified nucleotide
  modified_base 34: mod_base = OTHER; note = 2'-O-methyl modified nucleotide
  modified_base 35: mod_base = OTHER; note = 2'-O-methyl modified nucleotide
  modified_base 36: mod_base = OTHER; note = 2'-O-methyl modified nucleotide
  modified_base 37: mod_base = OTHER; note = 2'-O-methyl modified nucleotide
  modified_base 38: mod_base = OTHER; note = 2'-O-methyl modified nucleotide
  modified_base 39: mod_base = OTHER; note = 2'-O-methyl modified nucleotide
  modified_base 40: mod_base = OTHER; note = 2'-O-methyl modified nucleotide
  modified_base 69: mod_base = OTHER; note = 2'-O-methyl modified nucleotide
  modified_base 70: mod_base = OTHER; note = 2'-O-methyl modified nucleotide
  modified_base 71: mod_base = OTHER; note = 2'-O-methyl modified nucleotide
  modified_base 72: mod_base = OTHER; note = 2'-O-methyl modified nucleotide
  modified_base 73: mod_base = OTHER; note = 2'-O-methyl modified nucleotide
  modified_base 74: mod_base = OTHER; note = 2'-O-methyl modified nucleotide
  modified_base 75: mod_base = OTHER; note = 2'-O-methyl modified nucleotide
  modified_base 76: mod_base = OTHER; note = 2'-O-methyl modified nucleotide
  modified_base 77: mod_base = OTHER; note = 2'-O-methyl modified nucleotide
  modified_base 78: mod_base = OTHER; note = 2'-O-methyl modified nucleotide
  modified_base 79: mod_base = OTHER; note = 2'-O-methyl modified nucleotide
  modified_base 80: mod_base = OTHER; note = 2'-O-methyl modified nucleotide
  modified_base 81: mod_base = OTHER; note = 2'-O-methyl modified nucleotide
  modified_base 82: mod_base = OTHER; note = 2'-O-methyl modified nucleotide
  modified_base 83: mod_base = OTHER; note = 2'-O-methyl modified nucleotide
  modified_base 84: mod_base = OTHER; note = 2'-O-methyl modified nucleotide
  modified_base 85: mod_base = OTHER; note = 2'-O-methyl modified nucleotide
  modified_base 86: mod_base = OTHER; note = 2'-O-methyl modified nucleotide
  modified_base 87: mod_base = OTHER; note = 2'-O-methyl modified nucleotide
  modified_base 88: mod_base = OTHER; note = 2'-O-methyl modified nucleotide
  modified_base 89: mod_base = OTHER; note = 2'-O-methyl modified nucleotide
  modified_base 90: mod_base = OTHER; note = 2'-O-methyl modified nucleotide
  modified_base 91: mod_base = OTHER; note = 2'-O-methyl modified nucleotide
  modified_base 92: mod_base = OTHER; note = 2'-O-methyl modified nucleotide
  modified_base 93: mod_base = OTHER; note = 2'-O-methyl modified nucleotide
  modified_base 94: mod_base = OTHER; note = 2'-O-methyl modified nucleotide
  modified_base 95: mod_base = OTHER; note = 2'-O-methyl modified nucleotide
  modified_base 96: mod_base = OTHER; note = 2'-O-methyl modified nucleotide
  modified_base 123: mod_base = OTHER; note = Nucleotide with phosphorothioate linkage
  modified_base 124: mod_base = OTHER; note = 2'-O-methyl modified nucleotide with phosphorothioate linkage
  modified_base 125: mod_base = OTHER; note = 2'-O-methyl modified nucleotide with phosphorothioate linkage
  modified_base 126: mod_base = OTHER; note = 2'-O-methyl modified nucleotide
actcacgctggatagcctccgttttagagctagaaatagcaagttaaaataaggctagtccgttatcaacttgaaaaagtggcaccgagtcggtgctctttctggcctggataaccggctatccag

SEQ ID NO: 17677 - RNA, 125 nt, synthetic construct
  source 1..125: mol_type = other RNA
  modified_base 1: mod_base = OTHER; note = 2'-O-methyl modified nucleotide with phosphorothioate linkage
  modified_base 2: mod_base = OTHER; note = 2'-O-methyl modified nucleotide with phosphorothioate linkage
  modified_base 3: mod_base = OTHER; note = 2'-O-methyl modified nucleotide with phosphorothioate linkage
  modified_base 29: mod_base = OTHER; note = 2'-O-methyl modified nucleotide
  modified_base 30: mod_base = OTHER; note = 2'-O-methyl modified nucleotide
  modified_base 31: mod_base = OTHER; note = 2'-O-methyl modified nucleotide
  modified_base 32: mod_base = OTHER; note = 2'-O-methyl modified nucleotide
  modified_base 33: mod_base = OTHER; note = 2'-O-methyl modified nucleotide
  modified_base 34: mod_base = OTHER; note = 2'-O-methyl modified nucleotide
  modified_base 35: mod_base = OTHER; note = 2'-O-methyl modified nucleotide
  modified_base 36: mod_base = OTHER; note = 2'-O-methyl modified nucleotide
  modified_base 37: mod_base = OTHER; note = 2'-O-methyl modified nucleotide
  modified_base 38: mod_base = OTHER; note = 2'-O-methyl modified nucleotide
  modified_base 39: mod_base = OTHER; note = 2'-O-methyl modified nucleotide
  modified_base 40: mod_base = OTHER; note = 2'-O-methyl modified nucleotide
  modified_base 69: mod_base = OTHER; note = 2'-O-methyl modified nucleotide
  modified_base 70: mod_base = OTHER; note = 2'-O-methyl modified nucleotide
  modified_base 71: mod_base = OTHER; note = 2'-O-methyl modified nucleotide
  modified_base 72: mod_base = OTHER; note = 2'-O-methyl modified nucleotide
  modified_base 73: mod_base = OTHER; note = 2'-O-methyl modified nucleotide
  modified_base 74: mod_base = OTHER; note = 2'-O-methyl modified nucleotide
  modified_base 75: mod_base = OTHER; note = 2'-O-methyl modified nucleotide
  modified_base 76: mod_base = OTHER; note = 2'-O-methyl modified nucleotide
  modified_base 77: mod_base = OTHER; note = 2'-O-methyl modified nucleotide
  modified_base 78: mod_base = OTHER; note = 2'-O-methyl modified nucleotide
  modified_base 79: mod_base = OTHER; note = 2'-O-methyl modified nucleotide
  modified_base 80: mod_base = OTHER; note = 2'-O-methyl modified nucleotide
  modified_base 81: mod_base = OTHER; note = 2'-O-methyl modified nucleotide
  modified_base 82: mod_base = OTHER; note = 2'-O-methyl modified nucleotide
  modified_base 83: mod_base = OTHER; note = 2'-O-methyl modified nucleotide
  modified_base 84: mod_base = OTHER; note = 2'-O-methyl modified nucleotide
  modified_base 85: mod_base = OTHER; note = 2'-O-methyl modified nucleotide
  modified_base 86: mod_base = OTHER; note = 2'-O-methyl modified nucleotide
  modified_base 87: mod_base = OTHER; note = 2'-O-methyl modified nucleotide
  modified_base 88: mod_base = OTHER; note = 2'-O-methyl modified nucleotide
  modified_base 89: mod_base = OTHER; note = 2'-O-methyl modified nucleotide
  modified_base 90: mod_base = OTHER; note = 2'-O-methyl modified nucleotide
  modified_base 91: mod_base = OTHER; note = 2'-O-methyl modified nucleotide
  modified_base 92: mod_base = OTHER; note = 2'-O-methyl modified nucleotide
  modified_base 93: mod_base = OTHER; note = 2'-O-methyl modified nucleotide
  modified_base 94: mod_base = OTHER; note = 2'-O-methyl modified nucleotide
  modified_base 95: mod_base = OTHER; note = 2'-O-methyl modified nucleotide
  modified_base 96: mod_base = OTHER; note = 2'-O-methyl modified nucleotide
  modified_base 122: mod_base = OTHER; note = Nucleotide with phosphorothioate linkage
  modified_base 123: mod_base = OTHER; note = 2'-O-methyl modified nucleotide with phosphorothioate linkage
  modified_base 124: mod_base = OTHER; note = 2'-O-methyl modified nucleotide with phosphorothioate linkage
  modified_base 125: mod_base = OTHER; note = 2'-O-methyl modified nucleotide
actcacgctggatagcctccgttttagagctagaaatagcaagttaaaataaggctagtccgttatcaacttgaaaaagtggcaccgagtcggtgctctttctggcctggataaccggctatcca

SEQ ID NO: 17678 - RNA, 124 nt, synthetic construct
  source 1..124: mol_type = other RNA
  modified_base 1: mod_base = OTHER; note = 2'-O-methyl modified nucleotide with phosphorothioate linkage
  modified_base 2: mod_base = OTHER; note = 2'-O-methyl modified nucleotide with phosphorothioate linkage
  modified_base 3: mod_base = OTHER; note = 2'-O-methyl modified nucleotide with phosphorothioate linkage
  modified_base 29: mod_base = OTHER; note = 2'-O-methyl modified nucleotide
  modified_base 30: mod_base = OTHER; note = 2'-O-methyl modified nucleotide
  modified_base 31: mod_base = OTHER; note = 2'-O-methyl modified nucleotide
  modified_base 32: mod_base = OTHER; note = 2'-O-methyl modified nucleotide
  modified_base 33: mod_base = OTHER; note = 2'-O-methyl modified nucleotide
  modified_base 34: mod_base = OTHER; note = 2'-O-methyl modified nucleotide
  modified_base 35: mod_base = OTHER; note = 2'-O-methyl modified nucleotide
  modified_base 36: mod_base = OTHER; note = 2'-O-methyl modified nucleotide
  modified_base 37: mod_base = OTHER; note = 2'-O-methyl modified nucleotide
  modified_base 38: mod_base = OTHER; note = 2'-O-methyl modified nucleotide
  modified_base 39: mod_base = OTHER; note = 2'-O-methyl modified nucleotide
  modified_base 40: mod_base = OTHER; note = 2'-O-methyl modified nucleotide
  modified_base 69: mod_base = OTHER; note = 2'-O-methyl modified nucleotide
  modified_base 70: mod_base = OTHER; note = 2'-O-methyl modified nucleotide
  modified_base 71: mod_base = OTHER; note = 2'-O-methyl modified nucleotide
  modified_base 72: mod_base = OTHER; note = 2'-O-methyl modified nucleotide
  modified_base 73: mod_base = OTHER; note = 2'-O-methyl modified nucleotide
  modified_base 74: mod_base = OTHER; note = 2'-O-methyl modified nucleotide
  modified_base 75: mod_base = OTHER; note = 2'-O-methyl modified nucleotide
  modified_base 76: mod_base = OTHER; note = 2'-O-methyl modified nucleotide
  modified_base 77: mod_base = OTHER; note = 2'-O-methyl modified nucleotide
  modified_base 78: mod_base = OTHER; note = 2'-O-methyl modified nucleotide
  modified_base 79: mod_base = OTHER; note = 2'-O-methyl modified nucleotide
  modified_base 80: mod_base = OTHER; note = 2'-O-methyl modified nucleotide
  modified_base 81: mod_base = OTHER; note = 2'-O-methyl modified nucleotide
  modified_base 82: mod_base = OTHER; note = 2'-O-methyl modified nucleotide
  modified_base 83: mod_base = OTHER; note = 2'-O-methyl modified nucleotide
  modified_base 84: mod_base = OTHER; note = 2'-O-methyl modified nucleotide
  modified_base 85: mod_base = OTHER; note = 2'-O-methyl modified nucleotide
  modified_base 86: mod_base = OTHER; note = 2'-O-methyl modified nucleotide
  modified_base 87: mod_base = OTHER; note = 2'-O-methyl modified nucleotide
  modified_base 88: mod_base = OTHER; note = 2'-O-methyl modified nucleotide
  modified_base 89: mod_base = OTHER; note = 2'-O-methyl modified nucleotide
  modified_base 90: mod_base = OTHER; note = 2'-O-methyl modified nucleotide
  modified_base 91: mod_base = OTHER; note = 2'-O-methyl modified nucleotide
  modified_base 92: mod_base = OTHER; note = 2'-O-methyl modified nucleotide
  modified_base 93: mod_base = OTHER; note = 2'-O-methyl modified nucleotide
  modified_base 94: mod_base = OTHER; note = 2'-O-methyl modified nucleotide
  modified_base 95: mod_base = OTHER; note = 2'-O-methyl modified nucleotide
  modified_base 96: mod_base = OTHER; note = 2'-O-methyl modified nucleotide
  modified_base 121: mod_base = OTHER; note = Nucleotide with phosphorothioate linkage
  modified_base 122: mod_base = OTHER; note = 2'-O-methyl modified nucleotide with phosphorothioate linkage
  modified_base 123: mod_base = OTHER; note = 2'-O-methyl modified nucleotide with phosphorothioate linkage
  modified_base 124: mod_base = OTHER; note = 2'-O-methyl modified nucleotide
actcacgctggatagcctccgttttagagctagaaatagcaagttaaaataaggctagtccgttatcaacttgaaaaagtggcaccgagtcggtgctctttctggcctggataaccggctatcc

SEQ ID NO: 17679 - RNA, 131 nt, synthetic construct
  source 1..131: mol_type = other RNA
  modified_base 1: mod_base = OTHER; note = 2'-O-methyl modified nucleotide with phosphorothioate linkage
  modified_base 2: mod_base = OTHER; note = 2'-O-methyl modified nucleotide with phosphorothioate linkage
  modified_base 3: mod_base = OTHER; note = 2'-O-methyl modified nucleotide with phosphorothioate linkage
  modified_base 29: mod_base = OTHER; note = 2'-O-methyl modified nucleotide
  modified_base 30: mod_base = OTHER; note = 2'-O-methyl modified nucleotide
  modified_base 31: mod_base = OTHER; note = 2'-O-methyl modified nucleotide
  modified_base 32: mod_base = OTHER; note = 2'-O-methyl modified nucleotide
  modified_base 33: mod_base = OTHER; note = 2'-O-methyl modified nucleotide
  modified_base 34: mod_base = OTHER; note = 2'-O-methyl modified nucleotide
  modified_base 35: mod_base = OTHER; note = 2'-O-methyl modified nucleotide
  modified_base 36: mod_base = OTHER; note = 2'-O-methyl modified nucleotide
  modified_base 37: mod_base = OTHER; note = 2'-O-methyl modified nucleotide
  modified_base 38: mod_base = OTHER; note = 2'-O-methyl modified nucleotide
  modified_base 39: mod_base = OTHER; note = 2'-O-methyl modified nucleotide
  modified_base 40: mod_base = OTHER; note = 2'-O-methyl modified nucleotide
  modified_base 69: mod_base = OTHER; note = 2'-O-methyl modified nucleotide
  modified_base 70: mod_base = OTHER; note = 2'-O-methyl modified nucleotide
  modified_base 71: mod_base = OTHER; note = 2'-O-methyl modified nucleotide
  modified_base 72: mod_base = OTHER; note = 2'-O-methyl modified nucleotide
  modified_base 73: mod_base = OTHER; note = 2'-O-methyl modified nucleotide
  modified_base 74: mod_base = OTHER; note = 2'-O-methyl modified nucleotide
  modified_base 75: mod_base = OTHER; note = 2'-O-methyl modified nucleotide
  modified_base 76: mod_base = OTHER; note = 2'-O-methyl modified nucleotide
  modified_base 77: mod_base = OTHER; note = 2'-O-methyl modified nucleotide
  modified_base 78: mod_base = OTHER; note = 2'-O-methyl modified nucleotide
  modified_base 79: mod_base = OTHER; note = 2'-O-methyl modified nucleotide
  modified_base 80: mod_base = OTHER; note = 2'-O-methyl modified nucleotide
  modified_base 81: mod_base = OTHER; note = 2'-O-methyl modified nucleotide
  modified_base 82: mod_base = OTHER; note = 2'-O-methyl modified nucleotide
  modified_base 83: mod_base = OTHER; note = 2'-O-methyl modified nucleotide
  modified_base 84: mod_base = OTHER; note = 2'-O-methyl modified nucleotide
  modified_base 85: mod_base = OTHER; note = 2'-O-methyl modified nucleotide
  modified_base 86: mod_base = OTHER; note = 2'-O-methyl modified nucleotide
  modified_base 87: mod_base = OTHER; note = 2'-O-methyl modified nucleotide
  modified_base 88: mod_base = OTHER; note = 2'-O-methyl modified nucleotide
  modified_base 89: mod_base = OTHER; note = 2'-O-methyl modified nucleotide
  modified_base 90: mod_base = OTHER; note = 2'-O-methyl modified nucleotide
  modified_base 91: mod_base = OTHER; note = 2'-O-methyl modified nucleotide
  modified_base 92: mod_base = OTHER; note = 2'-O-methyl modified nucleotide
  modified_base 93: mod_base = OTHER; note = 2'-O-methyl modified nucleotide
  modified_base 94: mod_base = OTHER; note = 2'-O-methyl modified nucleotide
  modified_base 95: mod_base = OTHER; note = 2'-O-methyl modified nucleotide
  modified_base 96: mod_base = OTHER; note = 2'-O-methyl modified nucleotide
  modified_base 128: mod_base = OTHER; note = Nucleotide with phosphorothioate linkage
  modified_base 129: mod_base = OTHER; note = 2'-O-methyl modified nucleotide with phosphorothioate linkage
  modified_base 130: mod_base = OTHER; note = 2'-O-methyl modified nucleotide with phosphorothioate linkage
  modified_base 131: mod_base = OTHER; note = 2'-O-methyl modified nucleotide
actcacgctggatagcctccgttttagagctagaaatagcaagttaaaataaggctagtccgttatcaacttgaaaaagtggcaccgagtcggtgctctctttctggcctggataaccggctatccagcgt

SEQ ID NO: 17680 - RNA, 130 nt, synthetic construct
  source 1..130: mol_type = other RNA
  modified_base 1: mod_base = OTHER; note = 2'-O-methyl modified nucleotide with phosphorothioate linkage
  modified_base 2: mod_base = OTHER; note = 2'-O-methyl modified nucleotide with phosphorothioate linkage
  modified_base 3: mod_base = OTHER; note = 2'-O-methyl modified nucleotide with phosphorothioate linkage
  modified_base 29: mod_base = OTHER; note = 2'-O-methyl modified nucleotide
  modified_base 30: mod_base = OTHER; note = 2'-O-methyl modified nucleotide
  modified_base 31: mod_base = OTHER; note = 2'-O-methyl modified nucleotide
  modified_base 32: mod_base = OTHER; note = 2'-O-methyl modified nucleotide
  modified_base 33: mod_base = OTHER; note = 2'-O-methyl modified nucleotide
  modified_base 34: mod_base = OTHER; note = 2'-O-methyl modified nucleotide
  modified_base 35: mod_base = OTHER; note = 2'-O-methyl modified nucleotide
  modified_base 36: mod_base = OTHER; note = 2'-O-methyl modified nucleotide
  modified_base 37: mod_base = OTHER; note = 2'-O-methyl modified nucleotide
  modified_base 38: mod_base = OTHER; note = 2'-O-methyl modified nucleotide
  modified_base 39: mod_base = OTHER; note = 2'-O-methyl modified nucleotide
  modified_base 40: mod_base = OTHER; note = 2'-O-methyl modified nucleotide
  modified_base 69: mod_base = OTHER; note = 2'-O-methyl modified nucleotide
  modified_base 70: mod_base = OTHER; note = 2'-O-methyl modified nucleotide
  modified_base 71: mod_base = OTHER; note = 2'-O-methyl modified nucleotide
  modified_base 72: mod_base = OTHER; note = 2'-O-methyl modified nucleotide
  modified_base 73: mod_base = OTHER; note = 2'-O-methyl modified nucleotide
  modified_base 74: mod_base = OTHER; note = 2'-O-methyl modified nucleotide
  modified_base 75: mod_base = OTHER; note = 2'-O-methyl modified nucleotide
  modified_base 76: mod_base = OTHER; note = 2'-O-methyl modified nucleotide
  modified_base 77: mod_base = OTHER; note = 2'-O-methyl modified nucleotide
  modified_base 78: mod_base = OTHER; note = 2'-O-methyl modified nucleotide
  modified_base 79: mod_base = OTHER; note = 2'-O-methyl modified nucleotide
  modified_base 80: mod_base = OTHER; note = 2'-O-methyl modified nucleotide
  modified_base 81: mod_base = OTHER; note = 2'-O-methyl modified nucleotide
  modified_base 82: mod_base = OTHER; note = 2'-O-methyl modified nucleotide
  modified_base 83: mod_base = OTHER; note = 2'-O-methyl modified nucleotide
  modified_base 84: mod_base = OTHER; note = 2'-O-methyl modified nucleotide
  modified_base 85: mod_base = OTHER; note = 2'-O-methyl modified nucleotide
  modified_base 86: mod_base = OTHER; note = 2'-O-methyl modified nucleotide
  modified_base 87: mod_base = OTHER; note = 2'-O-methyl modified nucleotide
  modified_base 88: mod_base = OTHER; note = 2'-O-methyl modified nucleotide
  modified_base 89: mod_base = OTHER; note = 2'-O-methyl modified nucleotide
  modified_base 90: mod_base = OTHER; note = 2'-O-methyl modified nucleotide
  modified_base 91: mod_base = OTHER; note = 2'-O-methyl modified nucleotide
  modified_base 92: mod_base = OTHER; note = 2'-O-methyl modified nucleotide
  modified_base 93: mod_base = OTHER; note = 2'-O-methyl modified nucleotide
  modified_base 94: mod_base = OTHER; note = 2'-O-methyl modified nucleotide
  modified_base 95: mod_base = OTHER; note = 2'-O-methyl modified nucleotide
  modified_base 96: mod_base = OTHER; note = 2'-O-methyl modified nucleotide
  modified_base 127: mod_base = OTHER; note = Nucleotide with phosphorothioate linkage
  modified_base 128: mod_base = OTHER; note = 2'-O-methyl modified nucleotide with phosphorothioate linkage
  modified_base 129: mod_base = OTHER; note = 2'-O-methyl modified nucleotide with phosphorothioate linkage
  modified_base 130: mod_base = OTHER; note = 2'-O-methyl modified nucleotide
actcacgctggatagcctccgttttagagctagaaatagcaagttaaaataaggctagtccgttatcaacttgaaaaagtggcaccgagtcggtgctctctttctggcctggataaccggctatccagcg

SEQ ID NO: 17681 - RNA, 129 nt, synthetic construct
  source 1..129: mol_type = other RNA
  modified_base 1: mod_base = OTHER; note = 2'-O-methyl modified nucleotide with phosphorothioate linkage
  modified_base 2: mod_base = OTHER; note = 2'-O-methyl modified nucleotide with phosphorothioate linkage
  modified_base 3: mod_base = OTHER; note = 2'-O-methyl modified nucleotide with phosphorothioate linkage
  modified_base 29: mod_base = OTHER; note = 2'-O-methyl modified nucleotide
  modified_base 30: mod_base = OTHER; note = 2'-O-methyl modified nucleotide
  modified_base 31: mod_base = OTHER; note = 2'-O-methyl modified nucleotide
  modified_base 32: mod_base = OTHER; note = 2'-O-methyl modified nucleotide
  modified_base 33: mod_base = OTHER; note = 2'-O-methyl modified nucleotide
  modified_base 34: mod_base = OTHER; note = 2'-O-methyl modified nucleotide
  modified_base 35: mod_base = OTHER; note = 2'-O-methyl modified nucleotide
  modified_base 36: mod_base = OTHER; note = 2'-O-methyl modified nucleotide
  modified_base 37: mod_base = OTHER; note = 2'-O-methyl modified nucleotide
  modified_base 38: mod_base = OTHER; note = 2'-O-methyl modified nucleotide
  modified_base 39: mod_base = OTHER; note = 2'-O-methyl modified nucleotide
  modified_base 40: mod_base = OTHER; note = 2'-O-methyl modified nucleotide
  modified_base 69: mod_base = OTHER; note = 2'-O-methyl modified nucleotide
  modified_base 70: mod_base = OTHER; note = 2'-O-methyl modified nucleotide
  modified_base 71: mod_base = OTHER; note = 2'-O-methyl modified nucleotide
  modified_base 72: mod_base = OTHER; note = 2'-O-methyl modified nucleotide
  modified_base 73: mod_base = OTHER; note = 2'-O-methyl modified nucleotide
  modified_base 74: mod_base = OTHER; note = 2'-O-methyl modified nucleotide
  modified_base 75: mod_base = OTHER; note = 2'-O-methyl modified nucleotide
  modified_base 76: mod_base = OTHER; note = 2'-O-methyl modified nucleotide
  modified_base 77: mod_base = OTHER; note = 2'-O-methyl modified nucleotide
  modified_base 78: mod_base = OTHER; note = 2'-O-methyl modified nucleotide
  modified_base 79: mod_base = OTHER; note = 2'-O-methyl modified nucleotide
  modified_base 80: mod_base = OTHER; note = 2'-O-methyl modified nucleotide
  modified_base 81: mod_base = OTHER; note = 2'-O-methyl modified nucleotide
  modified_base 82: mod_base = OTHER; note = 2'-O-methyl modified nucleotide
  modified_base 83: mod_base = OTHER; note = 2'-O-methyl modified nucleotide
  modified_base 84: mod_base = OTHER; note = 2'-O-methyl modified nucleotide
  modified_base 85: mod_base = OTHER; note = 2'-O-methyl modified nucleotide
  modified_base 86: mod_base = OTHER; note = 2'-O-methyl modified nucleotide
  modified_base 87: mod_base = OTHER; note = 2'-O-methyl modified nucleotide
  modified_base 88: mod_base = OTHER; note = 2'-O-methyl modified nucleotide
  modified_base 89: mod_base = OTHER; note = 2'-O-methyl modified nucleotide
  modified_base 90: mod_base = OTHER; note = 2'-O-methyl modified nucleotide
  modified_base 91: mod_base = OTHER; note = 2'-O-methyl modified nucleotide
  modified_base 92: mod_base = OTHER; note = 2'-O-methyl modified nucleotide
  modified_base 93: mod_base = OTHER; note = 2'-O-methyl modified nucleotide
  modified_base 94: mod_base = OTHER; note = 2'-O-methyl modified nucleotide
  modified_base 95: mod_base = OTHER; note = 2'-O-methyl modified nucleotide
  modified_base 96: mod_base = OTHER; note = 2'-O-methyl modified nucleotide
  modified_base 126: mod_base = OTHER; note = Nucleotide with phosphorothioate linkage
  modified_base 127: mod_base = OTHER; note = 2'-O-methyl modified nucleotide with phosphorothioate linkage
  modified_base 128: mod_base = OTHER; note = 2'-O-methyl modified nucleotide with phosphorothioate linkage
  modified_base 129: mod_base = OTHER; note = 2'-O-methyl modified nucleotide
actcacgctggatagcctccgttttagagctagaaatagcaagttaaaataaggctagtccgttatcaacttgaaaaagtggcaccgagtcggtgctctctttctggcctggataaccggctatccagc

SEQ ID NO: 17682 - RNA, 128 nt, synthetic construct
  source 1..128: mol_type = other RNA
  modified_base 1: mod_base = OTHER; note = 2'-O-methyl modified nucleotide with phosphorothioate linkage
  modified_base 2: mod_base = OTHER; note = 2'-O-methyl modified nucleotide with phosphorothioate linkage
  modified_base 3: mod_base = OTHER; note = 2'-O-methyl modified nucleotide with phosphorothioate linkage
  modified_base 29: mod_base = OTHER; note = 2'-O-methyl modified nucleotide
  modified_base 30: mod_base = OTHER; note = 2'-O-methyl modified nucleotide
  modified_base 31: mod_base = OTHER; note = 2'-O-methyl modified nucleotide
  modified_base 32: mod_base = OTHER; note = 2'-O-methyl modified nucleotide
  modified_base 33: mod_base = OTHER; note = 2'-O-methyl modified nucleotide
  modified_base 34: mod_base = OTHER; note = 2'-O-methyl modified nucleotide
  modified_base 35: mod_base = OTHER; note = 2'-O-methyl modified nucleotide
  modified_base 36: mod_base = OTHER; note = 2'-O-methyl modified nucleotide
  modified_base 37: mod_base = OTHER; note = 2'-O-methyl modified nucleotide
  modified_base 38: mod_base = OTHER; note = 2'-O-methyl modified nucleotide
  modified_base 39: mod_base = OTHER; note = 2'-O-methyl modified nucleotide
  modified_base 40: mod_base = OTHER; note = 2'-O-methyl modified nucleotide
  modified_base 69: mod_base = OTHER; note = 2'-O-methyl modified nucleotide
  modified_base 70: mod_base = OTHER; note = 2'-O-methyl modified nucleotide
  modified_base 71: mod_base = OTHER; note = 2'-O-methyl modified nucleotide
  modified_base 72: mod_base = OTHER; note = 2'-O-methyl modified nucleotide
  modified_base 73: mod_base = OTHER; note = 2'-O-methyl modified nucleotide
  modified_base 74: mod_base = OTHER; note = 2'-O-methyl modified nucleotide
  modified_base 75: mod_base = OTHER; note = 2'-O-methyl modified nucleotide
  modified_base 76: mod_base = OTHER; note = 2'-O-methyl modified nucleotide
  modified_base 77: mod_base = OTHER; note = 2'-O-methyl modified nucleotide
  modified_base 78: mod_base = OTHER; note = 2'-O-methyl modified nucleotide
  modified_base 79: mod_base = OTHER; note = 2'-O-methyl modified nucleotide
  modified_base 80: mod_base = OTHER; note = 2'-O-methyl modified nucleotide
  modified_base 81: mod_base = OTHER; note = 2'-O-methyl modified nucleotide
  modified_base 82: mod_base = OTHER; note = 2'-O-methyl modified nucleotide
  modified_base 83: mod_base = OTHER; note = 2'-O-methyl modified nucleotide
  modified_base 84: mod_base = OTHER; note = 2'-O-methyl modified nucleotide
  modified_base 85: mod_base = OTHER; note = 2'-O-methyl modified nucleotide
  modified_base 86: mod_base = OTHER; note = 2'-O-methyl modified nucleotide
  modified_base 87: mod_base = OTHER; note = 2'-O-methyl modified nucleotide
  modified_base 88: mod_base = OTHER; note = 2'-O-methyl modified nucleotide
  modified_base 89: mod_base = OTHER; note = 2'-O-methyl modified nucleotide
  modified_base 90: mod_base = OTHER; note = 2'-O-methyl modified nucleotide
  modified_base 91: mod_base = OTHER; note = 2'-O-methyl modified nucleotide
  modified_base 92: mod_base = OTHER; note = 2'-O-methyl modified nucleotide
  modified_base 93: mod_base = OTHER; note = 2'-O-methyl modified nucleotide
  modified_base 94: mod_base = OTHER; note = 2'-O-methyl modified nucleotide
  modified_base 95: mod_base = OTHER; note = 2'-O-methyl modified nucleotide
  modified_base 96: mod_base = OTHER; note = 2'-O-methyl modified nucleotide
  modified_base 125: mod_base = OTHER; note = Nucleotide with phosphorothioate linkage
  modified_base 126: mod_base = OTHER; note = 2'-O-methyl modified nucleotide with phosphorothioate linkage
  modified_base 127: mod_base = OTHER; note = 2'-O-methyl modified nucleotide with phosphorothioate linkage
  modified_base 128: mod_base = OTHER; note = 2'-O-methyl modified nucleotide
actcacgctggatagcctccgttttagagctagaaatagcaagttaaaataaggctagtccgttatcaacttgaaaaagtggcaccgagtcggtgctctctttctggcctggataaccggctatccag

SEQ ID NO: 17683 - RNA, 127 nt, synthetic construct
  source 1..127: mol_type = other RNA
  modified_base 1: mod_base = OTHER; note = 2'-O-methyl modified nucleotide with phosphorothioate linkage
  modified_base 2: mod_base = OTHER; note = 2'-O-methyl modified nucleotide with phosphorothioate linkage
  modified_base 3: mod_base = OTHER; note = 2'-O-methyl modified nucleotide with phosphorothioate linkage
  modified_base 29: mod_base = OTHER; note = 2'-O-methyl modified nucleotide
  modified_base 30: mod_base = OTHER; note = 2'-O-methyl modified nucleotide
  modified_base 31: mod_base = OTHER; note = 2'-O-methyl modified nucleotide
  modified_base 32: mod_base = OTHER; note = 2'-O-methyl modified nucleotide
  modified_base 33: mod_base = OTHER; note = 2'-O-methyl modified nucleotide
  modified_base 34: mod_base = OTHER; note = 2'-O-methyl modified nucleotide
  modified_base 35: mod_base = OTHER; note = 2'-O-methyl modified nucleotide
  modified_base 36: mod_base = OTHER; note = 2'-O-methyl modified nucleotide
  modified_base 37: mod_base = OTHER; note = 2'-O-methyl modified nucleotide
  modified_base 38: mod_base = OTHER; note = 2'-O-methyl modified nucleotide
  modified_base 39: mod_base = OTHER; note = 2'-O-methyl modified nucleotide
  modified_base 40: mod_base = OTHER; note = 2'-O-methyl modified nucleotide
  modified_base 69: mod_base = OTHER; note = 2'-O-methyl modified nucleotide
  modified_base 70: mod_base = OTHER; note = 2'-O-methyl modified nucleotide
  modified_base 71: mod_base = OTHER; note = 2'-O-methyl modified nucleotide
  modified_base 72: mod_base = OTHER; note = 2'-O-methyl modified nucleotide
  modified_base 73: mod_base = OTHER; note = 2'-O-methyl modified nucleotide
  modified_base 74: mod_base = OTHER; note = 2'-O-methyl modified nucleotide
  modified_base 75: mod_base = OTHER; note = 2'-O-methyl modified nucleotide
  modified_base 76: mod_base = OTHER; note = 2'-O-methyl modified nucleotide
  modified_base 77: mod_base = OTHER; note = 2'-O-methyl modified nucleotide
  modified_base 78: mod_base = OTHER; note = 2'-O-methyl modified nucleotide
  modified_base 79: mod_base = OTHER; note = 2'-O-methyl modified nucleotide
  modified_base 80: mod_base = OTHER; note = 2'-O-methyl modified nucleotide
  modified_base 81: mod_base = OTHER; note = 2'-O-methyl modified nucleotide
  modified_base 82: mod_base = OTHER; note = 2'-O-methyl modified nucleotide
  modified_base 83: mod_base = OTHER; note = 2'-O-methyl modified nucleotide
  modified_base 84: mod_base = OTHER; note = 2'-O-methyl modified nucleotide
  modified_base 85: mod_base = OTHER; note = 2'-O-methyl modified nucleotide
  modified_base 86: mod_base = OTHER; note = 2'-O-methyl modified nucleotide
  modified_base 87: mod_base = OTHER; note = 2'-O-methyl modified nucleotide
  modified_base 88: mod_base = OTHER; note = 2'-O-methyl modified nucleotide
  modified_base 89: mod_base = OTHER; note = 2'-O-methyl modified nucleotide
  modified_base 90: mod_base = OTHER; note = 2'-O-methyl modified nucleotide
  modified_base 91: mod_base = OTHER; note = 2'-O-methyl modified nucleotide
  modified_base 92: mod_base = OTHER; note = 2'-O-methyl modified nucleotide
  modified_base 93: mod_base = OTHER; note = 2'-O-methyl modified nucleotide
  modified_base 94: mod_base = OTHER; note = 2'-O-methyl modified nucleotide
  modified_base 95: mod_base = OTHER; note = 2'-O-methyl modified nucleotide
  modified_base 96: mod_base = OTHER; note = 2'-O-methyl modified nucleotide
  modified_base 124: mod_base = OTHER; note = Nucleotide with phosphorothioate linkage
  modified_base 125: mod_base = OTHER; note = 2'-O-methyl modified nucleotide with phosphorothioate linkage
  modified_base 126: mod_base = OTHER; note = 2'-O-methyl modified nucleotide with phosphorothioate linkage
  modified_base 127: mod_base = OTHER; note = 2'-O-methyl modified nucleotide
actcacgctggatagcctccgttttagagctagaaatagcaagttaaaataaggctagtccgttatcaacttgaaaaagtggcaccgagtcggtgctctctttctggcctggataaccggctatcca

SEQ ID NO: 17684 - RNA, 126 nt, synthetic construct
  source 1..126: mol_type = other RNA
  modified_base 1: mod_base = OTHER; note = 2'-O-methyl modified nucleotide with phosphorothioate linkage
  modified_base 2: mod_base = OTHER; note = 2'-O-methyl modified nucleotide with phosphorothioate linkage
  modified_base 3: mod_base = OTHER; note = 2'-O-methyl modified nucleotide with phosphorothioate linkage
  modified_base 29: mod_base = OTHER; note = 2'-O-methyl modified nucleotide
  modified_base 30: mod_base = OTHER; note = 2'-O-methyl modified nucleotide
  modified_base 31: mod_base = OTHER; note = 2'-O-methyl modified nucleotide
  modified_base 32: mod_base = OTHER; note = 2'-O-methyl modified nucleotide
  modified_base 33: mod_base = OTHER; note = 2'-O-methyl modified nucleotide
  modified_base 34: mod_base = OTHER; note = 2'-O-methyl modified nucleotide
  modified_base 35: mod_base = OTHER; note = 2'-O-methyl modified nucleotide
  modified_base 36: mod_base = OTHER; note = 2'-O-methyl modified nucleotide
  modified_base 37: mod_base = OTHER; note = 2'-O-methyl modified nucleotide
  modified_base 38: mod_base = OTHER; note = 2'-O-methyl modified nucleotide
  modified_base 39: mod_base = OTHER; note = 2'-O-methyl modified nucleotide
  modified_base 40: mod_base = OTHER; note = 2'-O-methyl modified nucleotide
  modified_base 69: mod_base = OTHER; note = 2'-O-methyl modified nucleotide
  modified_base 70: mod_base = OTHER; note = 2'-O-methyl modified nucleotide
  modified_base 71: mod_base = OTHER; note = 2'-O-methyl modified nucleotide
  modified_base 72: mod_base = OTHER; note = 2'-O-methyl modified nucleotide
  modified_base 73: mod_base = OTHER; note = 2'-O-methyl modified nucleotide
  modified_base 74: mod_base = OTHER; note = 2'-O-methyl modified nucleotide
  modified_base 75: mod_base = OTHER; note = 2'-O-methyl modified nucleotide
  modified_base 76: mod_base = OTHER; note = 2'-O-methyl modified nucleotide
  modified_base 77: mod_base = OTHER; note = 2'-O-methyl modified nucleotide
  modified_base 78: mod_base = OTHER; note = 2'-O-methyl modified nucleotide
  modified_base 79: mod_base = OTHER; note = 2'-O-methyl modified nucleotide
  modified_base 80: mod_base = OTHER; note = 2'-O-methyl modified nucleotide
  modified_base 81: mod_base = OTHER; note = 2'-O-methyl modified nucleotide
  modified_base 82: mod_base = OTHER; note = 2'-O-methyl modified nucleotide
  modified_base 83: mod_base = OTHER; note = 2'-O-methyl modified nucleotide
  modified_base 84: mod_base = OTHER; note = 2'-O-methyl modified nucleotide
  modified_base 85: mod_base = OTHER; note = 2'-O-methyl modified nucleotide
  modified_base 86: mod_base = OTHER; note = 2'-O-methyl modified nucleotide
  modified_base 87: mod_base = OTHER; note = 2'-O-methyl modified nucleotide
  modified_base 88: mod_base = OTHER; note = 2'-O-methyl modified nucleotide
  modified_base 89: mod_base = OTHER; note = 2'-O-methyl modified nucleotide
  modified_base 90: mod_base = OTHER; note = 2'-O-methyl modified nucleotide
  modified_base 91: mod_base = OTHER; note = 2'-O-methyl modified nucleotide
  modified_base 92: mod_base = OTHER; note = 2'-O-methyl modified nucleotide
  modified_base 93: mod_base = OTHER; note = 2'-O-methyl modified nucleotide
  modified_base 94: mod_base = OTHER; note = 2'-O-methyl modified nucleotide
  modified_base 95: mod_base = OTHER; note = 2'-O-methyl modified nucleotide
  modified_base 96: mod_base = OTHER; note = 2'-O-methyl modified nucleotide
  modified_base 123: mod_base = OTHER; note = Nucleotide with phosphorothioate linkage
  modified_base 124: mod_base = OTHER; note = 2'-O-methyl modified nucleotide with phosphorothioate linkage
  modified_base 125: mod_base = OTHER; note = 2'-O-methyl modified nucleotide with phosphorothioate linkage
  modified_base 126: mod_base = OTHER; note = 2'-O-methyl modified nucleotide
actcacgctggatagcctccgttttagagctagaaatagcaagttaaaataaggctagtccgttatcaacttgaaaaagtggcaccgagtcggtgctctctttctggcctggataaccggctatcc

SEQ ID NO: 17685 - RNA, 133 nt, synthetic construct
  source 1..133: mol_type = other RNA
  modified_base 1: mod_base = OTHER; note = 2'-O-methyl modified nucleotide with phosphorothioate linkage
  modified_base 2: mod_base = OTHER; note = 2'-O-methyl modified nucleotide with phosphorothioate linkage
  modified_base 3: mod_base = OTHER; note = 2'-O-methyl modified nucleotide with phosphorothioate linkage
  modified_base 29: mod_base = OTHER; note = 2'-O-methyl modified nucleotide
  modified_base 30: mod_base = OTHER; note = 2'-O-methyl modified nucleotide
  modified_base 31: mod_base = OTHER; note = 2'-O-methyl modified nucleotide
  modified_base 32: mod_base = OTHER; note = 2'-O-methyl modified nucleotide
  modified_base 33: mod_base = OTHER; note = 2'-O-methyl modified nucleotide
  modified_base 34: mod_base = OTHER; note = 2'-O-methyl modified nucleotide
  modified_base 35: mod_base = OTHER; note = 2'-O-methyl modified nucleotide
  modified_base 36: mod_base = OTHER; note = 2'-O-methyl modified nucleotide
  modified_base 37: mod_base = OTHER; note = 2'-O-methyl modified nucleotide
  modified_base 38: mod_base = OTHER; note = 2'-O-methyl modified nucleotide
  modified_base 39: mod_base = OTHER; note = 2'-O-methyl modified nucleotide
  modified_base 40: mod_base = OTHER; note = 2'-O-methyl modified nucleotide
  modified_base 69: mod_base = OTHER; note = 2'-O-methyl modified nucleotide
  modified_base 70: mod_base = OTHER; note = 2'-O-methyl modified nucleotide
  modified_base 71: mod_base = OTHER; note = 2'-O-methyl modified nucleotide
  modified_base 72: mod_base = OTHER; note = 2'-O-methyl modified nucleotide
  modified_base 73: mod_base = OTHER; note = 2'-O-methyl modified nucleotide
  modified_base 74: mod_base = OTHER; note = 2'-O-methyl modified nucleotide
  modified_base 75: mod_base = OTHER; note = 2'-O-methyl modified nucleotide
  modified_base 76: mod_base = OTHER; note = 2'-O-methyl modified nucleotide
  modified_base 77: mod_base = OTHER; note = 2'-O-methyl modified nucleotide
  modified_base 78: mod_base = OTHER; note = 2'-O-methyl modified nucleotide
  modified_base 79: mod_base = OTHER; note = 2'-O-methyl modified nucleotide
  modified_base 80: mod_base = OTHER; note = 2'-O-methyl modified nucleotide
  modified_base 81: mod_base = OTHER; note = 2'-O-methyl modified nucleotide
  modified_base 82: mod_base = OTHER; note = 2'-O-methyl modified nucleotide
  modified_base 83: mod_base = OTHER; note = 2'-O-methyl modified nucleotide
  modified_base 84: mod_base = OTHER; note = 2'-O-methyl modified nucleotide
  modified_base 85: mod_base = OTHER; note = 2'-O-methyl modified nucleotide
  modified_base 86: mod_base = OTHER; note = 2'-O-methyl modified nucleotide
  modified_base 87: mod_base = OTHER; note = 2'-O-methyl modified nucleotide
  modified_base 88: mod_base = OTHER; note = 2'-O-methyl modified nucleotide
  modified_base 89: mod_base = OTHER; note = 2'-O-methyl modified nucleotide
  modified_base 90: mod_base = OTHER; note = 2'-O-methyl modified nucleotide
  modified_base 91: mod_base = OTHER; note = 2'-O-methyl modified nucleotide
  modified_base 92: mod_base = OTHER; note = 2'-O-methyl modified nucleotide
  modified_base 93: mod_base = OTHER; note = 2'-O-methyl modified nucleotide
  modified_base 94: mod_base = OTHER; note = 2'-O-methyl modified nucleotide
  modified_base 95: mod_base = OTHER; note = 2'-O-methyl modified nucleotide
  modified_base 96: mod_base = OTHER; note = 2'-O-methyl modified nucleotide
  modified_base 130: mod_base = OTHER; note = Nucleotide with phosphorothioate linkage
  modified_base 131: mod_base = OTHER; note = 2'-O-methyl modified nucleotide with phosphorothioate linkage
  modified_base 132: mod_base = OTHER; note = 2'-O-methyl modified nucleotide with phosphorothioate linkage
  modified_base 133: mod_base = OTHER; note = 2'-O-methyl modified nucleotide
actcacgctggatagcctccgttttagagctagaaatagcaagttaaaataaggctagtccgttatcaacttgaaaaagtggcaccgagtcggtgctctctctttctggcctggataaccggctatccagcgt

SEQ ID NO: 17686 - RNA, 132 nt, synthetic construct
  source 1..132: mol_type = other RNA
  modified_base 1: mod_base = OTHER; note = 2'-O-methyl modified nucleotide with phosphorothioate linkage
  modified_base 2: mod_base = OTHER; note = 2'-O-methyl modified nucleotide with phosphorothioate linkage
  modified_base 3: mod_base = OTHER; note = 2'-O-methyl modified nucleotide with phosphorothioate linkage
  modified_base 29: mod_base = OTHER; note = 2'-O-methyl modified nucleotide
  modified_base 30: mod_base = OTHER; note = 2'-O-methyl modified nucleotide
  modified_base 31: mod_base = OTHER; note = 2'-O-methyl modified nucleotide
  modified_base 32: mod_base = OTHER; note = 2'-O-methyl modified nucleotide
  modified_base 33: mod_base = OTHER; note = 2'-O-methyl modified nucleotide
  modified_base 34: mod_base = OTHER; note = 2'-O-methyl modified nucleotide
  modified_base 35: mod_base = OTHER; note = 2'-O-methyl modified nucleotide
  modified_base 36: mod_base = OTHER; note = 2'-O-methyl modified nucleotide
  modified_base 37: mod_base = OTHER; note = 2'-O-methyl modified nucleotide
  modified_base 38: mod_base = OTHER; note = 2'-O-methyl modified nucleotide
  modified_base 39: mod_base = OTHER; note = 2'-O-methyl modified nucleotide
  modified_base 40: mod_base = OTHER; note = 2'-O-methyl modified nucleotide
  modified_base 69: mod_base = OTHER; note = 2'-O-methyl modified nucleotide
  modified_base 70: mod_base = OTHER; note = 2'-O-methyl modified nucleotide
  modified_base 71: mod_base = OTHER; note = 2'-O-methyl modified nucleotide
  modified_base 72: mod_base = OTHER; note = 2'-O-methyl modified nucleotide
  modified_base 73: mod_base = OTHER; note = 2'-O-methyl modified nucleotide
  modified_base 74: mod_base = OTHER; note = 2'-O-methyl modified nucleotide
  modified_base 75: mod_base = OTHER; note = 2'-O-methyl modified nucleotide
  modified_base 76: mod_base = OTHER; note = 2'-O-methyl modified nucleotide
  modified_base 77: mod_base = OTHER; note = 2'-O-methyl modified nucleotide
  modified_base 78: mod_base = OTHER; note = 2'-O-methyl modified nucleotide
  modified_base 79: mod_base = OTHER; note = 2'-O-methyl modified nucleotide
  modified_base 80: mod_base = OTHER; note = 2'-O-methyl modified nucleotide
  modified_base 81: mod_base = OTHER; note = 2'-O-methyl modified nucleotide
  modified_base 82: mod_base = OTHER; note = 2'-O-methyl modified nucleotide
  modified_base 83: mod_base = OTHER; note = 2'-O-methyl modified nucleotide
  modified_base 84: mod_base = OTHER; note = 2'-O-methyl modified nucleotide
  modified_base 85: mod_base = OTHER; note = 2'-O-methyl modified nucleotide
  modified_base 86: mod_base = OTHER; note = 2'-O-methyl modified nucleotide
  modified_base 87: mod_base = OTHER; note = 2'-O-methyl modified nucleotide
  modified_base 88: mod_base = OTHER; note = 2'-O-methyl modified nucleotide
  modified_base 89: mod_base = OTHER; note = 2'-O-methyl modified nucleotide
  modified_base 90: mod_base = OTHER; note = 2'-O-methyl modified nucleotide
  modified_base 91: mod_base = OTHER; note = 2'-O-methyl modified nucleotide
  modified_base 92: mod_base = OTHER; note = 2'-O-methyl modified nucleotide
  modified_base 93: mod_base = OTHER; note = 2'-O-methyl modified nucleotide
  modified_base 94: mod_base = OTHER; note = 2'-O-methyl modified nucleotide
  modified_base 95: mod_base = OTHER; note = 2'-O-methyl modified nucleotide
  modified_base 96: mod_base = OTHER; note = 2'-O-methyl modified nucleotide
  modified_base 129: mod_base = OTHER; note = Nucleotide with phosphorothioate linkage
  modified_base 130: mod_base = OTHER; note = 2'-O-methyl modified nucleotide with phosphorothioate linkage
  modified_base 131: mod_base = OTHER; note = 2'-O-methyl modified nucleotide with phosphorothioate linkage
  modified_base 132: mod_base = OTHER; note = 2'-O-methyl modified nucleotide
actcacgctggatagcctccgttttagagctagaaatagcaagttaaaataaggctagtccgttatcaacttgaaaaagtggcaccgagtcggtgctctctctttctggcctggataaccggctatccagcg

SEQ ID NO: 17687 - RNA, 131 nt, synthetic construct
  source 1..131: mol_type = other RNA
  modified_base 1: mod_base = OTHER; note = 2'-O-methyl modified nucleotide with phosphorothioate linkage
  modified_base 2: mod_base = OTHER; note = 2'-O-methyl modified nucleotide with phosphorothioate linkage
  modified_base 3: mod_base = OTHER; note = 2'-O-methyl modified nucleotide with phosphorothioate linkage
  modified_base 29: mod_base = OTHER; note = 2'-O-methyl modified nucleotide
  modified_base 30: mod_base = OTHER; note = 2'-O-methyl modified nucleotide
  modified_base 31: mod_base = OTHER; note = 2'-O-methyl modified nucleotide
  modified_base 32: mod_base = OTHER; note = 2'-O-methyl modified nucleotide
  modified_base 33: mod_base = OTHER; note = 2'-O-methyl modified nucleotide
  modified_base 34: mod_base = OTHER; note = 2'-O-methyl modified nucleotide
  modified_base 35: mod_base = OTHER; note = 2'-O-methyl modified nucleotide
  modified_base 36: mod_base = OTHER; note = 2'-O-methyl modified nucleotide
  modified_base 37: mod_base = OTHER; note = 2'-O-methyl modified nucleotide
  modified_base 38: mod_base = OTHER; note = 2'-O-methyl modified nucleotide
  modified_base 39: mod_base = OTHER; note = 2'-O-methyl modified nucleotide
  modified_base 40: mod_base = OTHER; note = 2'-O-methyl modified nucleotide
  modified_base 69: mod_base = OTHER; note = 2'-O-methyl modified nucleotide
  modified_base 70: mod_base = OTHER; note = 2'-O-methyl modified nucleotide
  modified_base 71: mod_base = OTHER; note = 2'-O-methyl modified nucleotide
  modified_base 72: mod_base = OTHER; note = 2'-O-methyl modified nucleotide
  modified_base 73: mod_base = OTHER; note = 2'-O-methyl modified nucleotide
  modified_base 74: mod_base = OTHER; note = 2'-O-methyl modified nucleotide
  modified_base 75: mod_base = OTHER; note = 2'-O-methyl modified nucleotide
  modified_base 76: mod_base = OTHER; note = 2'-O-methyl modified nucleotide
  modified_base 77: mod_base = OTHER; note = 2'-O-methyl modified nucleotide
  modified_base 78: mod_base = OTHER; note = 2'-O-methyl modified nucleotide
  modified_base 79: mod_base = OTHER; note = 2'-O-methyl modified nucleotide
  modified_base 80: mod_base = OTHER; note = 2'-O-methyl modified nucleotide
  modified_base 81: mod_base = OTHER; note = 2'-O-methyl modified nucleotide
  modified_base 82: mod_base = OTHER; note = 2'-O-methyl modified nucleotide
  modified_base 83: mod_base = OTHER; note = 2'-O-methyl modified nucleotide
  modified_base 84: mod_base = OTHER; note = 2'-O-methyl modified nucleotide
  modified_base 85: mod_base = OTHER; note = 2'-O-methyl modified nucleotide
  modified_base 86: mod_base = OTHER; note = 2'-O-methyl modified nucleotide
  modified_base 87: mod_base = OTHER; note = 2'-O-methyl modified nucleotide
  modified_base 88: mod_base = OTHER; note = 2'-O-methyl modified nucleotide
  modified_base 89: mod_base = OTHER; note = 2'-O-methyl modified nucleotide
  modified_base 90: mod_base = OTHER; note = 2'-O-methyl modified nucleotide
  modified_base 91: mod_base = OTHER; note = 2'-O-methyl modified nucleotide
  modified_base 92: mod_base = OTHER; note = 2'-O-methyl modified nucleotide
  modified_base 93: mod_base = OTHER; note = 2'-O-methyl modified nucleotide
  modified_base 94: mod_base = OTHER; note = 2'-O-methyl modified nucleotide
  modified_base 95: mod_base = OTHER; note = 2'-O-methyl modified nucleotide
  modified_base 96: mod_base = OTHER; note = 2'-O-methyl modified nucleotide
  modified_base 128: mod_base = OTHER; note = Nucleotide with phosphorothioate linkage
  modified_base 129: mod_base = OTHER; note = 2'-O-methyl modified nucleotide with phosphorothioate linkage
  modified_base 130: mod_base = OTHER; note = 2'-O-methyl modified nucleotide with phosphorothioate linkage
  modified_base 131: mod_base = OTHER; note = 2'-O-methyl modified nucleotide
actcacgctggatagcctccgttttagagctagaaatagcaagttaaaataaggctagtccgttatcaacttgaaaaagtggcaccgagtcggtgctctctctttctggcctggataaccggctatccagc

SEQ ID NO: 17688 - RNA, 130 nt, synthetic construct
  source 1..130: mol_type = other RNA
  modified_base 1: mod_base = OTHER; note = 2'-O-methyl modified nucleotide with phosphorothioate linkage
  modified_base 2: mod_base = OTHER; note = 2'-O-methyl modified nucleotide with phosphorothioate linkage
  modified_base 3: mod_base = OTHER; note = 2'-O-methyl modified nucleotide with phosphorothioate linkage
  modified_base 29: mod_base = OTHER; note = 2'-O-methyl modified nucleotide
  modified_base 30: mod_base = OTHER; note = 2'-O-methyl modified nucleotide
  modified_base 31: mod_base = OTHER; note = 2'-O-methyl modified nucleotide
  modified_base 32: mod_base = OTHER; note = 2'-O-methyl modified nucleotide
  modified_base 33: mod_base = OTHER; note = 2'-O-methyl modified nucleotide
  modified_base 34: mod_base = OTHER; note = 2'-O-methyl modified nucleotide
  modified_base 35: mod_base = OTHER; note = 2'-O-methyl modified nucleotide
  modified_base 36: mod_base = OTHER; note = 2'-O-methyl modified nucleotide
  modified_base 37: mod_base = OTHER; note = 2'-O-methyl modified nucleotide
  modified_base 38: mod_base = OTHER; note = 2'-O-methyl modified nucleotide
  modified_base 39: mod_base = OTHER; note = 2'-O-methyl modified nucleotide
  modified_base 40: mod_base = OTHER; note = 2'-O-methyl modified nucleotide
  modified_base 69: mod_base = OTHER; note = 2'-O-methyl modified nucleotide
  modified_base 70: mod_base = OTHER; note = 2'-O-methyl modified nucleotide
  modified_base 71: mod_base = OTHER; note = 2'-O-methyl modified nucleotide
  modified_base 72: mod_base = OTHER; note = 2'-O-methyl modified nucleotide
  modified_base 73: mod_base = OTHER; note = 2'-O-methyl modified nucleotide
  modified_base 74: mod_base = OTHER; note = 2'-O-methyl modified nucleotide
  modified_base 75: mod_base = OTHER; note = 2'-O-methyl modified nucleotide
  modified_base 76: mod_base = OTHER; note = 2'-O-methyl modified nucleotide
  modified_base 77: mod_base = OTHER; note = 2'-O-methyl modified nucleotide
  modified_base 78: mod_base = OTHER; note = 2'-O-methyl modified nucleotide
  modified_base 79: mod_base = OTHER; note = 2'-O-methyl modified nucleotide
  modified_base 80: mod_base = OTHER; note = 2'-O-methyl modified nucleotide
  modified_base 81: mod_base = OTHER; note = 2'-O-methyl modified nucleotide
  modified_base 82: mod_base = OTHER; note = 2'-O-methyl modified nucleotide
  modified_base 83: mod_base = OTHER; note = 2'-O-methyl modified nucleotide
  modified_base 84: mod_base = OTHER; note = 2'-O-methyl modified nucleotide
  modified_base 85: mod_base = OTHER; note = 2'-O-methyl modified nucleotide
  modified_base 86: mod_base = OTHER; note = 2'-O-methyl modified nucleotide
  modified_base 87: mod_base = OTHER; note = 2'-O-methyl modified nucleotide
  modified_base 88: mod_base = OTHER; note = 2'-O-methyl modified nucleotide
  modified_base 89: mod_base = OTHER; note = 2'-O-methyl modified nucleotide
  modified_base 90: mod_base = OTHER; note = 2'-O-methyl modified nucleotide
  modified_base 91: mod_base = OTHER; note = 2'-O-methyl modified nucleotide
  modified_base 92: mod_base = OTHER; note = 2'-O-methyl modified nucleotide
  modified_base 93: mod_base = OTHER; note = 2'-O-methyl modified nucleotide
  modified_base 94: mod_base = OTHER; note = 2'-O-methyl modified nucleotide
  modified_base 95: mod_base = OTHER; note = 2'-O-methyl modified nucleotide
  modified_base 96: mod_base = OTHER; note = 2'-O-methyl modified nucleotide
  modified_base 127: mod_base = OTHER; note = Nucleotide with phosphorothioate linkage
  modified_base 128: mod_base = OTHER; note = 2'-O-methyl modified nucleotide with phosphorothioate linkage
  modified_base 129: mod_base = OTHER; note = 2'-O-methyl modified nucleotide with phosphorothioate linkage
  modified_base 130: mod_base = OTHER; note = 2'-O-methyl modified nucleotide
actcacgctggatagcctccgttttagagctagaaatagcaagttaaaataaggctagtccgttatcaacttgaaaaagtggcaccgagtcggtgctctctctttctggcctggataaccggctatccag

SEQ ID NO: 17689 - RNA, 129 nt, synthetic construct
  source 1..129: mol_type = other RNA
  modified_base 1: mod_base = OTHER; note = 2'-O-methyl modified nucleotide with phosphorothioate linkage
  modified_base 2: mod_base = OTHER; note = 2'-O-methyl modified nucleotide with phosphorothioate linkage
  modified_base 3: mod_base = OTHER; note = 2'-O-methyl modified nucleotide with phosphorothioate linkage
  modified_base 29: mod_base = OTHER; note = 2'-O-methyl modified nucleotide
  modified_base 30: mod_base = OTHER; note = 2'-O-methyl modified nucleotide
  modified_base 31: mod_base = OTHER; note = 2'-O-methyl modified nucleotide
  modified_base 32: mod_base = OTHER; note = 2'-O-methyl modified nucleotide
  modified_base 33: mod_base = OTHER; note = 2'-O-methyl modified nucleotide
  modified_base 34: mod_base = OTHER; note = 2'-O-methyl modified nucleotide
  modified_base 35: mod_base = OTHER; note = 2'-O-methyl modified nucleotide
  modified_base 36: mod_base = OTHER; note = 2'-O-methyl modified nucleotide
  modified_base 37: mod_base = OTHER; note = 2'-O-methyl modified nucleotide
  modified_base 38: mod_base = OTHER; note = 2'-O-methyl modified nucleotide
  modified_base 39: mod_base = OTHER; note = 2'-O-methyl modified nucleotide
  modified_base 40: mod_base = OTHER; note = 2'-O-methyl modified nucleotide
  modified_base 69: mod_base = OTHER; note = 2'-O-methyl modified nucleotide
  modified_base 70: mod_base = OTHER; note = 2'-O-methyl modified nucleotide
  modified_base 71: mod_base = OTHER; note = 2'-O-methyl modified nucleotide
  modified_base 72: mod_base = OTHER; note = 2'-O-methyl modified nucleotide
  modified_base 73: mod_base = OTHER; note = 2'-O-methyl modified nucleotide
  modified_base 74: mod_base = OTHER; note = 2'-O-methyl modified nucleotide
  modified_base 75: mod_base = OTHER; note = 2'-O-methyl modified nucleotide
  modified_base 76: mod_base = OTHER; note = 2'-O-methyl modified nucleotide
  modified_base 77: mod_base = OTHER; note = 2'-O-methyl modified nucleotide
  modified_base 78: mod_base = OTHER; note = 2'-O-methyl modified nucleotide
  modified_base 79: mod_base = OTHER; note = 2'-O-methyl modified nucleotide
  modified_base 80: mod_base = OTHER; note = 2'-O-methyl modified nucleotide
  modified_base 81: mod_base = OTHER; note = 2'-O-methyl modified nucleotide
  modified_base 82: mod_base = OTHER; note = 2'-O-methyl modified nucleotide
  modified_base 83: mod_base = OTHER; note = 2'-O-methyl modified nucleotide
  modified_base 84: mod_base = OTHER; note = 2'-O-methyl modified nucleotide
  modified_base 85: mod_base = OTHER; note = 2'-O-methyl modified nucleotide
  modified_base 86: mod_base = OTHER; note = 2'-O-methyl modified nucleotide
  modified_base 87: mod_base = OTHER; note = 2'-O-methyl modified nucleotide
  modified_base 88: mod_base = OTHER; note = 2'-O-methyl modified nucleotide
  modified_base 89: mod_base = OTHER; note = 2'-O-methyl modified nucleotide
  modified_base 90: mod_base = OTHER; note = 2'-O-methyl modified nucleotide
  modified_base 91: mod_base = OTHER; note = 2'-O-methyl modified nucleotide
  modified_base 92: mod_base = OTHER; note = 2'-O-methyl modified nucleotide
  modified_base 93: mod_base = OTHER; note = 2'-O-methyl modified nucleotide
  modified_base 94: mod_base = OTHER; note = 2'-O-methyl modified nucleotide
  modified_base 95: mod_base = OTHER; note = 2'-O-methyl modified nucleotide
  modified_base 96: mod_base = OTHER; note = 2'-O-methyl modified nucleotide
  modified_base 126: mod_base = OTHER; note = Nucleotide with phosphorothioate linkage
  modified_base 127: mod_base = OTHER; note = 2'-O-methyl modified nucleotide with phosphorothioate linkage
  modified_base 128: mod_base = OTHER; note = 2'-O-methyl modified nucleotide with phosphorothioate linkage
  modified_base 129: mod_base = OTHER; note = 2'-O-methyl modified nucleotide
actcacgctggatagcctccgttttagagctagaaatagcaagttaaaataaggctagtccgttatcaacttgaaaaagtggcaccgagtcggtgctctctctttctggcctggataaccggctatcca

SEQ ID NO: 17690 - RNA, 128 nt, synthetic construct
  source 1..128: mol_type = other RNA
  modified_base 1: mod_base = OTHER; note = 2'-O-methyl modified nucleotide with phosphorothioate linkage
  modified_base 2: mod_base = OTHER; note = 2'-O-methyl modified nucleotide with phosphorothioate linkage
  modified_base 3: mod_base = OTHER; note = 2'-O-methyl modified nucleotide with phosphorothioate linkage
  modified_base 29: mod_base = OTHER; note = 2'-O-methyl modified nucleotide
  modified_base 30: mod_base = OTHER; note = 2'-O-methyl modified nucleotide
  modified_base 31: mod_base = OTHER; note = 2'-O-methyl modified nucleotide
  modified_base 32: mod_base = OTHER; note = 2'-O-methyl modified nucleotide
  modified_base 33: mod_base = OTHER; note = 2'-O-methyl modified nucleotide
  modified_base 34: mod_base = OTHER; note = 2'-O-methyl modified nucleotide
  modified_base 35: mod_base = OTHER; note = 2'-O-methyl modified nucleotide
  modified_base 36: mod_base = OTHER; note = 2'-O-methyl modified nucleotide
  modified_base 37: mod_base = OTHER; note = 2'-O-methyl modified nucleotide
  modified_base 38: mod_base = OTHER; note = 2'-O-methyl modified nucleotide
  modified_base 39: mod_base = OTHER; note = 2'-O-methyl modified nucleotide
  modified_base 40: mod_base = OTHER; note = 2'-O-methyl modified nucleotide
  modified_base 69: mod_base = OTHER; note = 2'-O-methyl modified nucleotide
  modified_base 70: mod_base = OTHER; note = 2'-O-methyl modified nucleotide
  modified_base 71: mod_base = OTHER; note = 2'-O-methyl modified nucleotide
  modified_base 72: mod_base = OTHER; note = 2'-O-methyl modified nucleotide
  modified_base 73: mod_base = OTHER; note = 2'-O-methyl modified nucleotide
  modified_base 74: mod_base = OTHER; note = 2'-O-methyl modified nucleotide
  modified_base 75: mod_base = OTHER; note = 2'-O-methyl modified nucleotide
  modified_base 76: mod_base = OTHER; note = 2'-O-methyl modified nucleotide
  modified_base 77: mod_base = OTHER; note = 2'-O-methyl modified nucleotide
  modified_base 78: mod_base = OTHER; note = 2'-O-methyl modified nucleotide
  modified_base 79: mod_base = OTHER; note = 2'-O-methyl modified nucleotide
  modified_base 80: mod_base = OTHER; note = 2'-O-methyl modified nucleotide
  modified_base 81: mod_base = OTHER; note = 2'-O-methyl modified nucleotide
  modified_base 82: mod_base = OTHER; note = 2'-O-methyl modified nucleotide
  modified_base 83: mod_base = OTHER; note = 2'-O-methyl modified nucleotide
  modified_base 84: mod_base = OTHER; note = 2'-O-methyl modified nucleotide
  modified_base 85: mod_base = OTHER; note = 2'-O-methyl modified nucleotide
  modified_base 86: mod_base = OTHER; note = 2'-O-methyl modified nucleotide
  modified_base 87: mod_base = OTHER; note = 2'-O-methyl modified nucleotide
  modified_base 88: mod_base = OTHER; note = 2'-O-methyl modified nucleotide
  modified_base 89: mod_base = OTHER; note = 2'-O-methyl modified nucleotide
  modified_base 90: mod_base = OTHER; note = 2'-O-methyl modified nucleotide
  modified_base 91: mod_base = OTHER; note = 2'-O-methyl modified nucleotide
  modified_base 92: mod_base = OTHER; note = 2'-O-methyl modified nucleotide
  modified_base 93: mod_base = OTHER; note = 2'-O-methyl modified nucleotide
  modified_base 94: mod_base = OTHER; note = 2'-O-methyl modified nucleotide
  modified_base 95: mod_base = OTHER; note = 2'-O-methyl modified nucleotide
  modified_base 96: mod_base = OTHER; note = 2'-O-methyl modified nucleotide
  modified_base 125: mod_base = OTHER; note = Nucleotide with phosphorothioate linkage
  modified_base 126: mod_base = OTHER; note = 2'-O-methyl modified nucleotide with phosphorothioate linkage
  modified_base 127: mod_base = OTHER; note = 2'-O-methyl modified nucleotide with phosphorothioate linkage
  modified_base 128: mod_base = OTHER; note = 2'-O-methyl modified nucleotide
actcacgctggatagcctccgttttagagctagaaatagcaagttaaaataaggctagtccgttatcaacttgaaaaagtggcaccgagtcggtgctctctctttctggcctggataaccggctatcc

SEQ ID NO: 17691 - RNA, 120 nt, synthetic construct
  source 1..120: mol_type = other RNA
  modified_base 1: mod_base = OTHER; note = 2'-O-methyl modified nucleotide with phosphorothioate linkage
  modified_base 2: mod_base = OTHER; note = 2'-O-methyl modified nucleotide with phosphorothioate linkage
  modified_base 3: mod_base = OTHER; note = 2'-O-methyl modified nucleotide with phosphorothioate linkage
  modified_base 29: mod_base = OTHER; note = 2'-O-methyl modified nucleotide
  modified_base 30: mod_base = OTHER; note = 2'-O-methyl modified nucleotide
  modified_base 31: mod_base = OTHER; note = 2'-O-methyl modified nucleotide
  modified_base 32: mod_base = OTHER; note = 2'-O-methyl modified nucleotide
  modified_base 33: mod_base = OTHER; note = 2'-O-methyl modified nucleotide
  modified_base 34: mod_base = OTHER; note = 2'-O-methyl modified nucleotide
  modified_base 35: mod_base = OTHER; note = 2'-O-methyl modified nucleotide
  modified_base 36: mod_base = OTHER; note = 2'-O-methyl modified nucleotide
  modified_base 37: mod_base = OTHER; note = 2'-O-methyl modified nucleotide
  modified_base 38: mod_base = OTHER; note = 2'-O-methyl modified nucleotide
  modified_base 39: mod_base = OTHER; note = 2'-O-methyl modified nucleotide
  modified_base 40: mod_base = OTHER; note = 2'-O-methyl modified nucleotide
  modified_base 69: mod_base = OTHER; note = 2'-O-methyl modified nucleotide
  modified_base 70: mod_base = OTHER; note = 2'-O-methyl modified nucleotide
  modified_base 71: mod_base = OTHER; note = 2'-O-methyl modified nucleotide
  modified_base 72: mod_base = OTHER; note = 2'-O-methyl modified nucleotide
  modified_base 73: mod_base = OTHER; note = 2'-O-methyl modified nucleotide
  modified_base 74: mod_base = OTHER; note = 2'-O-methyl modified nucleotide
  modified_base 75: mod_base = OTHER; note = 2'-O-methyl modified nucleotide
  modified_base 76: mod_base = OTHER; note = 2'-O-methyl modified nucleotide
  modified_base 77: mod_base = OTHER; note = 2'-O-methyl modified nucleotide
  modified_base 78: mod_base = OTHER; note = 2'-O-methyl modified nucleotide
  modified_base 79: mod_base = OTHER; note = 2'-O-methyl modified nucleotide
  modified_base 80: mod_base = OTHER; note = 2'-O-methyl modified nucleotide
  modified_base 81: mod_base = OTHER; note = 2'-O-methyl modified nucleotide
  modified_base 82: mod_base = OTHER; note = 2'-O-methyl modified nucleotide
  modified_base 83: mod_base = OTHER; note = 2'-O-methyl modified nucleotide
  modified_base 84: mod_base = OTHER; note = 2'-O-methyl modified nucleotide
  modified_base 85: mod_base = OTHER; note = 2'-O-methyl modified nucleotide
  modified_base 86: mod_base = OTHER; note = 2'-O-methyl modified nucleotide
  modified_base 87: mod_base = OTHER; note = 2'-O-methyl modified nucleotide
  modified_base 88: mod_base = OTHER; note = 2'-O-methyl modified nucleotide
  modified_base 89: mod_base = OTHER; note = 2'-O-methyl modified nucleotide
  modified_base 90: mod_base = OTHER; note = 2'-O-methyl modified nucleotide
  modified_base 91: mod_base = OTHER; note = 2'-O-methyl modified nucleotide
  modified_base 92: mod_base = OTHER; note = 2'-O-methyl modified nucleotide
  modified_base 93: mod_base = OTHER; note = 2'-O-methyl modified nucleotide
  modified_base 94: mod_base = OTHER; note = 2'-O-methyl modified nucleotide
  modified_base 95: mod_base = OTHER; note = 2'-O-methyl modified nucleotide
  modified_base 96: mod_base = OTHER; note = 2'-O-methyl modified nucleotide
  modified_base 117: mod_base = OTHER; note = Nucleotide with phosphorothioate linkage
  modified_base 118: mod_base = OTHER; note = 2'-O-methyl modified nucleotide with phosphorothioate linkage
  modified_base 119: mod_base = OTHER; note = 2'-O-methyl modified nucleotide with phosphorothioate linkage
  modified_base 120: mod_base = OTHER; note = 2'-O-methyl modified nucleotide
gagtagcgcgagcacagctagttttagagctagaaatagcaagttaaaataaggctagtccgttatcaacttgaaaaagtggcaccgagtcggtgcgccttagtgatctgtgctcgcgct

SEQ ID NO: 17692 - RNA, 119 nt, synthetic construct
  source 1..119: mol_type = other RNA
  modified_base 1: mod_base = OTHER; note = 2'-O-methyl modified nucleotide with phosphorothioate linkage
  modified_base 2: mod_base = OTHER; note = 2'-O-methyl modified nucleotide with phosphorothioate linkage
  modified_base 3: mod_base = OTHER; note = 2'-O-methyl modified nucleotide with phosphorothioate linkage
  modified_base 29: mod_base = OTHER; note = 2'-O-methyl modified nucleotide
  modified_base 30: mod_base = OTHER; note = 2'-O-methyl modified nucleotide
  modified_base 31: mod_base = OTHER; note = 2'-O-methyl modified nucleotide
  modified_base 32: mod_base = OTHER; note = 2'-O-methyl modified nucleotide
  modified_base 33: mod_base = OTHER; note = 2'-O-methyl modified nucleotide
  modified_base 34: mod_base = OTHER; note = 2'-O-methyl modified nucleotide
  modified_base 35: mod_base = OTHER; note = 2'-O-methyl modified nucleotide
  modified_base 36: mod_base = OTHER; note = 2'-O-methyl modified nucleotide
  modified_base 37: mod_base = OTHER; note = 2'-O-methyl modified nucleotide
  modified_base 38: mod_base = OTHER; note = 2'-O-methyl modified nucleotide
  modified_base 39: mod_base = OTHER; note = 2'-O-methyl modified nucleotide
  modified_base 40: mod_base = OTHER; note = 2'-O-methyl modified nucleotide
  modified_base 69: mod_base = OTHER; note = 2'-O-methyl modified nucleotide
  modified_base 70: mod_base = OTHER; note = 2'-O-methyl modified nucleotide
  modified_base 71: mod_base = OTHER; note = 2'-O-methyl modified nucleotide
  modified_base 72: mod_base = OTHER; note = 2'-O-methyl modified nucleotide
  modified_base 73: mod_base = OTHER; note = 2'-O-methyl modified nucleotide
  modified_base 74: mod_base = OTHER; note = 2'-O-methyl modified nucleotide
  modified_base 75: mod_base = OTHER; note = 2'-O-methyl modified nucleotide
  modified_base 76: mod_base = OTHER; note = 2'-O-methyl modified nucleotide
  modified_base 77: mod_base = OTHER; note = 2'-O-methyl modified nucleotide
  modified_base 78: mod_base = OTHER; note = 2'-O-methyl modified nucleotide
  modified_base 79: mod_base = OTHER; note = 2'-O-methyl modified nucleotide
  modified_base 80: mod_base = OTHER; note = 2'-O-methyl modified nucleotide
  modified_base 81: mod_base = OTHER; note = 2'-O-methyl modified nucleotide
  modified_base 82: mod_base = OTHER; note = 2'-O-methyl modified nucleotide
  modified_base 83: mod_base = OTHER; note = 2'-O-methyl modified nucleotide
  modified_base 84: mod_base = OTHER; note = 2'-O-methyl modified nucleotide
  modified_base 85: mod_base = OTHER; note = 2'-O-methyl modified nucleotide
  modified_base 86: mod_base = OTHER; note = 2'-O-methyl modified nucleotide
  modified_base 87: mod_base = OTHER; note = 2'-O-methyl modified nucleotide
  modified_base 88: mod_base = OTHER; note = 2'-O-methyl modified nucleotide
  modified_base 89: mod_base = OTHER; note = 2'-O-methyl modified nucleotide
  modified_base 90: mod_base = OTHER; note = 2'-O-methyl modified nucleotide
  modified_base 91: mod_base = OTHER; note = 2'-O-methyl modified nucleotide
  modified_base 92: mod_base = OTHER; note = 2'-O-methyl modified nucleotide
  modified_base 93: mod_base = OTHER; note = 2'-O-methyl modified nucleotide
  modified_base 94: mod_base = OTHER; note = 2'-O-methyl modified nucleotide
  modified_base 95: mod_base = OTHER; note = 2'-O-methyl modified nucleotide
  modified_base 96: mod_base = OTHER; note = 2'-O-methyl modified nucleotide
  modified_base 116: mod_base = OTHER; note = Nucleotide with phosphorothioate linkage
  modified_base 117: mod_base = OTHER; note = 2'-O-methyl modified nucleotide with phosphorothioate linkage
  modified_base 118: mod_base = OTHER; note = 2'-O-methyl modified nucleotide with phosphorothioate linkage
  modified_base 119: mod_base = OTHER; note = 2'-O-methyl modified nucleotide
gagtagcgcgagcacagctagttttagagctagaaatagcaagttaaaataaggctagtccgttatcaacttgaaaaagtggcaccgagtcggtgcgccttagtgatctgtgctcgcgc

SEQ ID NO: 17693 - RNA, 118 nt, synthetic construct
  source 1..118: mol_type = other RNA
  modified_base 1: mod_base = OTHER; note = 2'-O-methyl modified nucleotide with phosphorothioate linkage
  modified_base 2: mod_base = OTHER; note = 2'-O-methyl modified nucleotide with phosphorothioate linkage
  modified_base 3: mod_base = OTHER; note = 2'-O-methyl modified nucleotide with phosphorothioate linkage
  modified_base 29: mod_base = OTHER; note = 2'-O-methyl modified nucleotide
  modified_base 30: mod_base = OTHER; note = 2'-O-methyl modified nucleotide
  modified_base 31: mod_base = OTHER; note = 2'-O-methyl modified nucleotide
  modified_base 32: mod_base = OTHER; note = 2'-O-methyl modified nucleotide
  modified_base 33: mod_base = OTHER; note = 2'-O-methyl modified nucleotide
  modified_base 34: mod_base = OTHER; note = 2'-O-methyl modified nucleotide
  modified_base 35: mod_base = OTHER; note = 2'-O-methyl modified nucleotide
  modified_base 36: mod_base = OTHER; note = 2'-O-methyl modified nucleotide
  modified_base 37: mod_base = OTHER; note = 2'-O-methyl modified nucleotide
  modified_base 38: mod_base = OTHER; note = 2'-O-methyl modified nucleotide
  modified_base 39: mod_base = OTHER; note = 2'-O-methyl modified nucleotide
  modified_base 40: mod_base = OTHER; note = 2'-O-methyl modified nucleotide
  modified_base 69: mod_base = OTHER; note = 2'-O-methyl modified nucleotide
  modified_base 70: mod_base = OTHER; note = 2'-O-methyl modified nucleotide
  modified_base 71: mod_base = OTHER; note = 2'-O-methyl modified nucleotide
  modified_base 72: mod_base = OTHER; note = 2'-O-methyl modified nucleotide
  modified_base 73: mod_base = OTHER; note = 2'-O-methyl modified nucleotide
  modified_base 74: mod_base = OTHER; note = 2'-O-methyl modified nucleotide
  modified_base 75: mod_base = OTHER; note = 2'-O-methyl modified nucleotide
  modified_base 76: mod_base = OTHER; note = 2'-O-methyl modified nucleotide
  modified_base 77: mod_base = OTHER; note = 2'-O-methyl modified nucleotide
  modified_base 78: mod_base = OTHER; note = 2'-O-methyl modified nucleotide
  modified_base 79: mod_base = OTHER; note = 2'-O-methyl modified nucleotide
  modified_base 80: mod_base = OTHER; note = 2'-O-methyl modified nucleotide
  modified_base 81: mod_base = OTHER; note = 2'-O-methyl modified nucleotide
  modified_base 82: mod_base = OTHER; note = 2'-O-methyl modified nucleotide
  modified_base 83: mod_base = OTHER; note = 2'-O-methyl modified nucleotide
  modified_base 84: mod_base = OTHER; note = 2'-O-methyl modified nucleotide
  modified_base 85: mod_base = OTHER; note = 2'-O-methyl modified nucleotide
  modified_base 86: mod_base = OTHER; note = 2'-O-methyl modified nucleotide
  modified_base 87: mod_base = OTHER; note = 2'-O-methyl modified nucleotide
  modified_base 88: mod_base = OTHER; note = 2'-O-methyl modified nucleotide
  modified_base 89: mod_base = OTHER; note = 2'-O-methyl modified nucleotide
  modified_base 90: mod_base = OTHER; note = 2'-O-methyl modified nucleotide
  modified_base 91: mod_base = OTHER; note = 2'-O-methyl modified nucleotide
  modified_base 92: mod_base = OTHER; note = 2'-O-methyl modified nucleotide
  modified_base 93: mod_base = OTHER; note = 2'-O-methyl modified nucleotide
  modified_base 94: mod_base = OTHER; note = 2'-O-methyl modified nucleotide
  modified_base 95: mod_base = OTHER; note = 2'-O-methyl modified nucleotide
  modified_base 96: mod_base = OTHER; note = 2'-O-methyl modified nucleotide
  modified_base 115: mod_base = OTHER; note = Nucleotide with phosphorothioate linkage
  modified_base 116: mod_base = OTHER; note = 2'-O-methyl modified nucleotide with phosphorothioate linkage
  modified_base 117: mod_base = OTHER; note = 2'-O-methyl modified nucleotide with phosphorothioate linkage
  modified_base 118: mod_base = OTHER; note = 2'-O-methyl modified nucleotide
gagtagcgcgagcacagctagttttagagctagaaatagcaagttaaaataaggctagtccgttatcaacttgaaaaagtggcaccgagtcggtgcgccttagtgatctgtgctcgcg

SEQ ID NO: 17694 - RNA, 117 nt, synthetic construct
  source 1..117: mol_type = other RNA
  modified_base 1: mod_base = OTHER; note = 2'-O-methyl modified nucleotide with phosphorothioate linkage
  modified_base 2: mod_base = OTHER; note = 2'-O-methyl modified nucleotide with phosphorothioate linkage
  modified_base 3: mod_base = OTHER; note = 2'-O-methyl modified nucleotide with phosphorothioate linkage
  modified_base 29: mod_base = OTHER; note = 2'-O-methyl modified nucleotide
  modified_base 30: mod_base = OTHER; note = 2'-O-methyl modified nucleotide
  modified_base 31: mod_base = OTHER; note = 2'-O-methyl modified nucleotide
  modified_base 32: mod_base = OTHER; note = 2'-O-methyl modified nucleotide
  modified_base 33: mod_base = OTHER; note = 2'-O-methyl modified nucleotide
  modified_base 34: mod_base = OTHER; note = 2'-O-methyl modified nucleotide
  modified_base 35: mod_base = OTHER; note = 2'-O-methyl modified nucleotide
  modified_base 36: mod_base = OTHER; note = 2'-O-methyl modified nucleotide
  modified_base 37: mod_base = OTHER; note = 2'-O-methyl modified nucleotide
  modified_base 38: mod_base = OTHER; note = 2'-O-methyl modified nucleotide
  modified_base 39: mod_base = OTHER; note = 2'-O-methyl modified nucleotide
  modified_base 40: mod_base = OTHER; note = 2'-O-methyl modified nucleotide
  modified_base 69: mod_base = OTHER; note = 2'-O-methyl modified nucleotide
  modified_base 70: mod_base = OTHER; note = 2'-O-methyl modified nucleotide
  modified_base 71: mod_base = OTHER; note = 2'-O-methyl modified nucleotide
  modified_base 72: mod_base = OTHER; note = 2'-O-methyl modified nucleotide
  modified_base 73: mod_base = OTHER; note = 2'-O-methyl modified nucleotide
  modified_base 74: mod_base = OTHER; note = 2'-O-methyl modified nucleotide
  modified_base 75: mod_base = OTHER; note = 2'-O-methyl modified nucleotide
  modified_base 76: mod_base = OTHER; note = 2'-O-methyl modified nucleotide
  modified_base 77: mod_base = OTHER; note = 2'-O-methyl modified nucleotide
  modified_base 78: mod_base = OTHER; note = 2'-O-methyl modified nucleotide
  modified_base 79: mod_base = OTHER; note = 2'-O-methyl modified nucleotide
  modified_base 80: mod_base = OTHER; note = 2'-O-methyl modified nucleotide
  modified_base 81: mod_base = OTHER; note = 2'-O-methyl modified nucleotide
  modified_base 82: mod_base = OTHER; note = 2'-O-methyl modified nucleotide
  modified_base 83: mod_base = OTHER; note = 2'-O-methyl modified nucleotide
  modified_base 84: mod_base = OTHER; note = 2'-O-methyl modified nucleotide
  modified_base 85: mod_base = OTHER; note = 2'-O-methyl modified nucleotide
  modified_base 86: mod_base = OTHER; note = 2'-O-methyl modified nucleotide
  modified_base 87: mod_base = OTHER; note = 2'-O-methyl modified nucleotide
  modified_base 88: mod_base = OTHER; note = 2'-O-methyl modified nucleotide
  modified_base 89: mod_base = OTHER; note = 2'-O-methyl modified nucleotide
  modified_base 90: mod_base = OTHER; note = 2'-O-methyl modified nucleotide
  modified_base 91: mod_base = OTHER; note = 2'-O-methyl modified nucleotide
  modified_base 92: mod_base = OTHER; note = 2'-O-methyl modified nucleotide
  modified_base 93: mod_base = OTHER; note = 2'-O-methyl modified nucleotide
  modified_base 94: mod_base = OTHER; note = 2'-O-methyl modified nucleotide
  modified_base 95: mod_base = OTHER; note = 2'-O-methyl modified nucleotide
  modified_base 96: mod_base = OTHER; note = 2'-O-methyl modified nucleotide
  modified_base 114: mod_base = OTHER; note = Nucleotide with phosphorothioate linkage
  modified_base 115: mod_base = OTHER; note = 2'-O-methyl modified nucleotide with phosphorothioate linkage
  modified_base 116: mod_base = OTHER; note = 2'-O-methyl modified nucleotide with phosphorothioate linkage
  modified_base 117: mod_base = OTHER; note = 2'-O-methyl modified nucleotide
gagtagcgcgagcacagctagttttagagctagaaatagcaagttaaaataaggctagtccgttatcaacttgaaaaagtggcaccgagtcggtgcgccttagtgatctgtgctcgc

SEQ ID NO: 17695 - RNA, 116 nt, synthetic construct
  source 1..116: mol_type = other RNA
  modified_base 1: mod_base = OTHER; note = 2'-O-methyl modified nucleotide with phosphorothioate linkage
  modified_base 2: mod_base = OTHER; note = 2'-O-methyl modified nucleotide with phosphorothioate linkage
  modified_base 3: mod_base = OTHER; note = 2'-O-methyl modified nucleotide with phosphorothioate linkage
  modified_base 29: mod_base = OTHER; note = 2'-O-methyl modified nucleotide
  modified_base 30: mod_base = OTHER; note = 2'-O-methyl modified nucleotide
  modified_base 31: mod_base = OTHER; note = 2'-O-methyl modified nucleotide
  modified_base 32: mod_base = OTHER; note = 2'-O-methyl modified nucleotide
  modified_base 33: mod_base = OTHER; note = 2'-O-methyl modified nucleotide
  modified_base 34: mod_base = OTHER; note = 2'-O-methyl modified nucleotide
  modified_base 35: mod_base = OTHER; note = 2'-O-methyl modified nucleotide
  modified_base 36: mod_base = OTHER; note = 2'-O-methyl modified nucleotide
  modified_base 37: mod_base = OTHER; note = 2'-O-methyl modified nucleotide
  modified_base 38: mod_base = OTHER; note = 2'-O-methyl modified nucleotide
  modified_base 39: mod_base = OTHER; note = 2'-O-methyl modified nucleotide
  modified_base 40: mod_base = OTHER; note = 2'-O-methyl modified nucleotide
  modified_base 69: mod_base = OTHER; note = 2'-O-methyl modified nucleotide
  modified_base 70: mod_base = OTHER; note = 2'-O-methyl modified nucleotide
  modified_base 71: mod_base = OTHER; note = 2'-O-methyl modified nucleotide
  modified_base 72: mod_base = OTHER; note = 2'-O-methyl modified nucleotide
  modified_base 73: mod_base = OTHER; note = 2'-O-methyl modified nucleotide
  modified_base 74: mod_base = OTHER; note = 2'-O-methyl modified nucleotide
  modified_base 75: mod_base = OTHER; note = 2'-O-methyl modified nucleotide
  modified_base 76: mod_base = OTHER; note = 2'-O-methyl modified nucleotide
  modified_base 77: mod_base = OTHER; note = 2'-O-methyl modified nucleotide
  modified_base 78: mod_base = OTHER; note = 2'-O-methyl modified nucleotide
  modified_base 79: mod_base = OTHER; note = 2'-O-methyl modified nucleotide
  modified_base 80: mod_base = OTHER; note = 2'-O-methyl modified nucleotide
  modified_base 81: mod_base = OTHER; note = 2'-O-methyl modified nucleotide
  modified_base 82: mod_base = OTHER; note = 2'-O-methyl modified nucleotide
  modified_base 83: mod_base = OTHER; note = 2'-O-methyl modified nucleotide
  modified_base 84: mod_base = OTHER; note = 2'-O-methyl modified nucleotide
  modified_base 85: mod_base = OTHER; note = 2'-O-methyl modified nucleotide
  modified_base 86: mod_base = OTHER; note = 2'-O-methyl modified nucleotide
  modified_base 87: mod_base = OTHER; note = 2'-O-methyl modified nucleotide
  modified_base 88: mod_base = OTHER; note = 2'-O-methyl modified nucleotide
  modified_base 89: mod_base = OTHER; note = 2'-O-methyl modified nucleotide
  modified_base 90: mod_base = OTHER; note = 2'-O-methyl modified nucleotide
  modified_base 91: mod_base = OTHER; note = 2'-O-methyl modified nucleotide
  modified_base 92: mod_base = OTHER; note = 2'-O-methyl modified nucleotide
  modified_base 93: mod_base = OTHER; note = 2'-O-methyl modified nucleotide
  modified_base 94: mod_base = OTHER; note = 2'-O-methyl modified nucleotide
  modified_base 95: mod_base = OTHER; note = 2'-O-methyl modified nucleotide
  modified_base 96: mod_base = OTHER; note = 2'-O-methyl modified nucleotide
  modified_base 113: mod_base = OTHER; note = Nucleotide with phosphorothioate linkage
  modified_base 114: mod_base = OTHER; note = 2'-O-methyl modified nucleotide with phosphorothioate linkage
  modified_base 115: mod_base = OTHER; note = 2'-O-methyl modified nucleotide with phosphorothioate linkage
  modified_base 116: mod_base = OTHER; note = 2'-O-methyl modified nucleotide
gagtagcgcgagcacagctagttttagagctagaaatagcaagttaaaataaggctagtccgttatcaacttgaaaaagtggcaccgagtcggtgcgccttagtgatctgtgctcg

SEQ ID NO: 17696 - RNA, 115 nt, synthetic construct
  source 1..115: mol_type = other RNA
  modified_base 1: mod_base = OTHER; note = 2'-O-methyl modified nucleotide with phosphorothioate linkage
  modified_base 2: mod_base = OTHER; note = 2'-O-methyl modified nucleotide with phosphorothioate linkage
  modified_base 3: mod_base = OTHER; note = 2'-O-methyl modified nucleotide with phosphorothioate linkage
  modified_base 29: mod_base = OTHER; note = 2'-O-methyl modified nucleotide
  modified_base 30: mod_base = OTHER; note = 2'-O-methyl modified nucleotide
  modified_base 31: mod_base = OTHER; note = 2'-O-methyl modified nucleotide
  modified_base 32: mod_base = OTHER; note = 2'-O-methyl modified nucleotide
  modified_base 33: mod_base = OTHER; note = 2'-O-methyl modified nucleotide
  modified_base 34: mod_base = OTHER; note = 2'-O-methyl modified nucleotide
  modified_base 35: mod_base = OTHER; note = 2'-O-methyl modified nucleotide
  modified_base 36: mod_base = OTHER; note = 2'-O-methyl modified nucleotide
  modified_base 37: mod_base = OTHER; note = 2'-O-methyl modified nucleotide
  modified_base 38: mod_base = OTHER; note = 2'-O-methyl modified nucleotide
  modified_base 39: mod_base = OTHER; note = 2'-O-methyl modified nucleotide
  modified_base 40: mod_base = OTHER; note = 2'-O-methyl modified nucleotide
  modified_base 69: mod_base = OTHER; note = 2'-O-methyl modified nucleotide
  modified_base 70: mod_base = OTHER; note = 2'-O-methyl modified nucleotide
  modified_base 71: mod_base = OTHER; note = 2'-O-methyl modified nucleotide
  modified_base 72: mod_base = OTHER; note = 2'-O-methyl modified nucleotide
  modified_base 73: mod_base = OTHER; note = 2'-O-methyl modified nucleotide
  modified_base 74: mod_base = OTHER; note = 2'-O-methyl modified nucleotide
  modified_base 75: mod_base = OTHER; note = 2'-O-methyl modified nucleotide
  modified_base 76: mod_base = OTHER; note = 2'-O-methyl modified nucleotide
  modified_base 77: mod_base = OTHER; note = 2'-O-methyl modified nucleotide
  modified_base 78: mod_base = OTHER; note = 2'-O-methyl modified nucleotide
  modified_base 79: mod_base = OTHER; note = 2'-O-methyl modified nucleotide
  modified_base 80: mod_base = OTHER; note = 2'-O-methyl modified nucleotide
  modified_base 81: mod_base = OTHER; note = 2'-O-methyl modified nucleotide
  modified_base 82: mod_base = OTHER; note = 2'-O-methyl modified nucleotide
  modified_base 83: mod_base = OTHER; note = 2'-O-methyl modified nucleotide
  modified_base 84: mod_base = OTHER; note = 2'-O-methyl modified nucleotide
  modified_base 85: mod_base = OTHER; note = 2'-O-methyl modified nucleotide
  modified_base 86: mod_base = OTHER; note = 2'-O-methyl modified nucleotide
  modified_base 87: mod_base = OTHER; note = 2'-O-methyl modified nucleotide
  modified_base 88: mod_base = OTHER; note = 2'-O-methyl modified nucleotide
  modified_base 89: mod_base = OTHER; note = 2'-O-methyl modified nucleotide
  modified_base 90: mod_base = OTHER; note = 2'-O-methyl modified nucleotide
  modified_base 91: mod_base = OTHER; note = 2'-O-methyl modified nucleotide
  modified_base 92: mod_base = OTHER; note = 2'-O-methyl modified nucleotide
  modified_base 93: mod_base = OTHER; note = 2'-O-methyl modified nucleotide
  modified_base 94: mod_base = OTHER; note = 2'-O-methyl modified nucleotide
  modified_base 95: mod_base = OTHER; note = 2'-O-methyl modified nucleotide
  modified_base 96: mod_base = OTHER; note = 2'-O-methyl modified nucleotide
  modified_base 112: mod_base = OTHER; note = Nucleotide with phosphorothioate linkage
  modified_base 113: mod_base = OTHER; note = 2'-O-methyl modified nucleotide with phosphorothioate linkage
  modified_base 114: mod_base = OTHER; note = 2'-O-methyl modified nucleotide with phosphorothioate linkage
  modified_base 115: mod_base = OTHER; note = 2'-O-methyl modified nucleotide
gagtagcgcgagcacagctagttttagagctagaaatagcaagttaaaataaggctagtccgttatcaacttgaaaaagtggcaccgagtcggtgcgccttagtgatctgtgctc

SEQ ID NO: 17697 - RNA, 122 nt, synthetic construct
  source 1..122: mol_type = other RNA
  modified_base 1: mod_base = OTHER; note = 2'-O-methyl modified nucleotide with phosphorothioate linkage
  modified_base 2: mod_base = OTHER; note = 2'-O-methyl modified nucleotide with phosphorothioate linkage
  modified_base 3: mod_base = OTHER; note = 2'-O-methyl modified nucleotide with phosphorothioate linkage
  modified_base 29: mod_base = OTHER; note = 2'-O-methyl modified nucleotide
  modified_base 30: mod_base = OTHER; note = 2'-O-methyl modified nucleotide
  modified_base 31: mod_base = OTHER; note = 2'-O-methyl modified nucleotide
  modified_base 32: mod_base = OTHER; note = 2'-O-methyl modified nucleotide
  modified_base 33: mod_base = OTHER; note = 2'-O-methyl modified nucleotide
  modified_base 34: mod_base = OTHER; note = 2'-O-methyl modified nucleotide
  modified_base 35: mod_base = OTHER; note = 2'-O-methyl modified nucleotide
  modified_base 36: mod_base = OTHER; note = 2'-O-methyl modified nucleotide
  modified_base 37: mod_base = OTHER; note = 2'-O-methyl modified nucleotide
  modified_base 38: mod_base = OTHER; note = 2'-O-methyl modified nucleotide
  modified_base 39: mod_base = OTHER; note = 2'-O-methyl modified nucleotide
  modified_base 40: mod_base = OTHER; note = 2'-O-methyl modified nucleotide
  modified_base 69: mod_base = OTHER; note = 2'-O-methyl modified nucleotide
  modified_base 70: mod_base = OTHER; note = 2'-O-methyl modified nucleotide
  modified_base 71: mod_base = OTHER; note = 2'-O-methyl modified nucleotide
  modified_base 72: mod_base = OTHER; note = 2'-O-methyl modified nucleotide
  modified_base 73: mod_base = OTHER; note = 2'-O-methyl modified nucleotide
  modified_base 74: mod_base = OTHER; note = 2'-O-methyl modified nucleotide
  modified_base 75: mod_base = OTHER; note = 2'-O-methyl modified nucleotide
  modified_base 76: mod_base = OTHER; note = 2'-O-methyl modified nucleotide
  modified_base 77: mod_base = OTHER; note = 2'-O-methyl modified nucleotide
  modified_base 78: mod_base = OTHER; note = 2'-O-methyl modified nucleotide
  modified_base 79: mod_base = OTHER; note = 2'-O-methyl modified nucleotide
  modified_base 80: mod_base = OTHER; note = 2'-O-methyl modified nucleotide
  modified_base 81: mod_base = OTHER; note = 2'-O-methyl modified nucleotide
  modified_base 82: mod_base = OTHER; note = 2'-O-methyl modified nucleotide
  modified_base 83: mod_base = OTHER; note = 2'-O-methyl modified nucleotide
  modified_base 84: mod_base = OTHER; note = 2'-O-methyl modified nucleotide
  modified_base 85: mod_base = OTHER; note = 2'-O-methyl modified nucleotide
  modified_base 86: mod_base = OTHER; note = 2'-O-methyl modified nucleotide
  modified_base 87: mod_base = OTHER; note = 2'-O-methyl modified nucleotide
  modified_base 88: mod_base = OTHER; note = 2'-O-methyl modified nucleotide
  modified_base 89: mod_base = OTHER; note = 2'-O-methyl modified nucleotide
  modified_base 90: mod_base = OTHER; note = 2'-O-methyl modified nucleotide
  modified_base 91: mod_base = OTHER; note = 2'-O-methyl modified nucleotide
  modified_base 92: mod_base = OTHER; note = 2'-O-methyl modified nucleotide
  modified_base 93: mod_base = OTHER; note = 2'-O-methyl modified nucleotide
  modified_base 94: mod_base = OTHER; note = 2'-O-methyl modified nucleotide
  modified_base 95: mod_base = OTHER; note = 2'-O-methyl modified nucleotide
  modified_base 96: mod_base = OTHER; note = 2'-O-methyl modified nucleotide
  modified_base 119: mod_base = OTHER; note = Nucleotide with phosphorothioate linkage
  modified_base 120: mod_base = OTHER; note = 2'-O-methyl modified nucleotide with phosphorothioate linkage
  modified_base 121: mod_base = OTHER; note = 2'-O-methyl modified nucleotide with phosphorothioate linkage
  modified_base 122: mod_base = OTHER; note = 2'-O-methyl modified nucleotide
gagtagcgcgagcacagctagttttagagctagaaatagcaagttaaaataaggctagtccgttatcaacttgaaaaagtggcaccgagtcggtgctggccttagtgatctgtgctcgcgct

SEQ ID NO: 17698 - RNA, 121 nt, synthetic construct
  source 1..121: mol_type = other RNA
  modified_base 1: mod_base = OTHER; note = 2'-O-methyl modified nucleotide with phosphorothioate linkage
  modified_base 2: mod_base = OTHER; note = 2'-O-methyl modified nucleotide with phosphorothioate linkage
  modified_base 3: mod_base = OTHER; note = 2'-O-methyl modified nucleotide with phosphorothioate linkage
  modified_base 29: mod_base = OTHER; note = 2'-O-methyl modified nucleotide
  modified_base 30: mod_base = OTHER; note = 2'-O-methyl modified nucleotide
  modified_base 31: mod_base = OTHER; note = 2'-O-methyl modified nucleotide
  modified_base 32: mod_base = OTHER; note = 2'-O-methyl modified nucleotide
  modified_base 33: mod_base = OTHER; note = 2'-O-methyl modified nucleotide
  modified_base 34: mod_base = OTHER; note = 2'-O-methyl modified nucleotide
  modified_base 35: mod_base = OTHER; note = 2'-O-methyl modified nucleotide
  modified_base 36: mod_base = OTHER; note = 2'-O-methyl modified nucleotide
  modified_base 37: mod_base = OTHER; note = 2'-O-methyl modified nucleotide
  modified_base 38: mod_base = OTHER; note = 2'-O-methyl modified nucleotide
  modified_base 39: mod_base = OTHER; note = 2'-O-methyl modified nucleotide
  modified_base 40: mod_base = OTHER; note = 2'-O-methyl modified nucleotide
  modified_base 69: mod_base = OTHER; note = 2'-O-methyl modified nucleotide
  modified_base 70: mod_base = OTHER; note = 2'-O-methyl modified nucleotide
  modified_base 71: mod_base = OTHER; note = 2'-O-methyl modified nucleotide
  modified_base 72: mod_base = OTHER; note = 2'-O-methyl modified nucleotide
  modified_base 73: mod_base = OTHER; note = 2'-O-methyl modified nucleotide
  modified_base 74: mod_base = OTHER; note = 2'-O-methyl modified nucleotide
  modified_base 75: mod_base = OTHER; note = 2'-O-methyl modified nucleotide
  modified_base 76: mod_base = OTHER; note = 2'-O-methyl modified nucleotide
  modified_base 77: mod_base = OTHER; note = 2'-O-methyl modified nucleotide
  modified_base 78: mod_base = OTHER; note = 2'-O-methyl modified nucleotide
  modified_base 79: mod_base = OTHER; note = 2'-O-methyl modified nucleotide
  modified_base 80: mod_base = OTHER; note = 2'-O-methyl modified nucleotide
  modified_base 81: mod_base = OTHER; note = 2'-O-methyl modified nucleotide
  modified_base 82: mod_base = OTHER; note = 2'-O-methyl modified nucleotide
  modified_base 83: mod_base = OTHER; note = 2'-O-methyl modified nucleotide
  modified_base 84: mod_base = OTHER; note = 2'-O-methyl modified nucleotide
  modified_base 85: mod_base = OTHER; note = 2'-O-methyl modified nucleotide
  modified_base 86: mod_base = OTHER; note = 2'-O-methyl modified nucleotide
  modified_base 87: mod_base = OTHER; note = 2'-O-methyl modified nucleotide
  modified_base 88: mod_base = OTHER; note = 2'-O-methyl modified nucleotide
  modified_base 89: mod_base = OTHER; note = 2'-O-methyl modified nucleotide
  modified_base 90: mod_base = OTHER; note = 2'-O-methyl modified nucleotide
  modified_base 91: mod_base = OTHER; note = 2'-O-methyl modified nucleotide
  modified_base 92: mod_base = OTHER; note = 2'-O-methyl modified nucleotide
  modified_base 93: mod_base = OTHER; note = 2'-O-methyl modified nucleotide
  modified_base 94: mod_base = OTHER; note = 2'-O-methyl modified nucleotide
  modified_base 95: mod_base = OTHER; note = 2'-O-methyl modified nucleotide
  modified_base 96: mod_base = OTHER; note = 2'-O-methyl modified nucleotide
  modified_base 118: mod_base = OTHER; note = Nucleotide with phosphorothioate linkage
  modified_base 119: mod_base = OTHER; note = 2'-O-methyl modified nucleotide with phosphorothioate linkage
  modified_base 120: mod_base = OTHER; note = 2'-O-methyl modified nucleotide with phosphorothioate linkage
  modified_base 121: mod_base = OTHER; note = 2'-O-methyl modified nucleotide
gagtagcgcgagcacagctagttttagagctagaaatagcaagttaaaataaggctagtccgttatcaacttgaaaaagtggcaccgagtcggtgctggccttagtgatctgtgctcgcgc

SEQ ID NO: 17699 - RNA, 120 nt, synthetic construct
  source 1..120: mol_type = other RNA
  modified_base 1: mod_base = OTHER; note = 2'-O-methyl modified nucleotide with phosphorothioate linkage
  modified_base 2: mod_base = OTHER; note = 2'-O-methyl modified nucleotide with phosphorothioate linkage
  modified_base 3: mod_base = OTHER; note = 2'-O-methyl modified nucleotide with phosphorothioate linkage
  modified_base 29: mod_base = OTHER; note = 2'-O-methyl modified nucleotide
  modified_base 30: mod_base = OTHER; note = 2'-O-methyl modified nucleotide
  modified_base 31: mod_base = OTHER; note = 2'-O-methyl modified nucleotide
  modified_base 32: mod_base = OTHER; note = 2'-O-methyl modified nucleotide
  modified_base 33: mod_base = OTHER; note = 2'-O-methyl modified nucleotide
  modified_base 34: mod_base = OTHER; note = 2'-O-methyl modified nucleotide
  modified_base 35: mod_base = OTHER; note = 2'-O-methyl modified nucleotide
  modified_base 36: mod_base = OTHER; note = 2'-O-methyl modified nucleotide
  modified_base 37: mod_base = OTHER; note = 2'-O-methyl modified nucleotide
  modified_base 38: mod_base = OTHER; note = 2'-O-methyl modified nucleotide
  modified_base 39: mod_base = OTHER; note = 2'-O-methyl modified nucleotide
  modified_base 40: mod_base = OTHER; note = 2'-O-methyl modified nucleotide
  modified_base 69: mod_base = OTHER; note = 2'-O-methyl modified nucleotide
  modified_base 70: mod_base = OTHER; note = 2'-O-methyl modified nucleotide
  modified_base 71: mod_base = OTHER; note = 2'-O-methyl modified nucleotide
  modified_base 72: mod_base = OTHER; note = 2'-O-methyl modified nucleotide
  modified_base 73: mod_base = OTHER; note = 2'-O-methyl modified nucleotide
  modified_base 74: mod_base = OTHER; note = 2'-O-methyl modified nucleotide
  modified_base 75: mod_base = OTHER; note = 2'-O-methyl modified nucleotide
  modified_base 76: mod_base = OTHER; note = 2'-O-methyl modified nucleotide
  modified_base 77: mod_base = OTHER; note = 2'-O-methyl modified nucleotide
  modified_base 78: mod_base = OTHER; note = 2'-O-methyl modified nucleotide
  modified_base 79: mod_base = OTHER; note = 2'-O-methyl modified nucleotide
  modified_base 80: mod_base = OTHER; note = 2'-O-methyl modified nucleotide
  modified_base 81: mod_base = OTHER; note = 2'-O-methyl modified nucleotide
  modified_base 82: mod_base = OTHER; note = 2'-O-methyl modified nucleotide
  modified_base 83: mod_base = OTHER; note = 2'-O-methyl modified nucleotide
  modified_base 84: mod_base = OTHER; note = 2'-O-methyl modified nucleotide
  modified_base 85: mod_base = OTHER; note = 2'-O-methyl modified nucleotide
  modified_base 86: mod_base = OTHER; note = 2'-O-methyl modified nucleotide
  modified_base 87: mod_base = OTHER; note = 2'-O-methyl modified nucleotide
  modified_base 88: mod_base = OTHER; note = 2'-O-methyl modified nucleotide
  modified_base 89: mod_base = OTHER; note = 2'-O-methyl modified nucleotide
  modified_base 90: mod_base = OTHER; note = 2'-O-methyl modified nucleotide
  modified_base 91: mod_base = OTHER; note = 2'-O-methyl modified nucleotide
  modified_base 92: mod_base = OTHER; note = 2'-O-methyl modified nucleotide
  modified_base 93: mod_base = OTHER; note = 2'-O-methyl modified nucleotide
  modified_base 94: mod_base = OTHER; note = 2'-O-methyl modified nucleotide
  modified_base 95: mod_base = OTHER; note = 2'-O-methyl modified nucleotide
  modified_base 96: mod_base = OTHER; note = 2'-O-methyl modified nucleotide
  modified_base 117: mod_base = OTHER; note = Nucleotide with phosphorothioate linkage
  modified_base 118: mod_base = OTHER; note = 2'-O-methyl modified nucleotide with phosphorothioate linkage
  modified_base 119: mod_base = OTHER; note = 2'-O-methyl modified nucleotide with phosphorothioate linkage
  modified_base 120: mod_base = OTHER; note = 2'-O-methyl modified nucleotide
gagtagcgcgagcacagctagttttagagctagaaatagcaagttaaaataaggctagtccgttatcaacttgaaaaagtggcaccgagtcggtgctggccttagtgatctgtgctcgcg

SEQ ID NO: 17700 - RNA, 119 nt, synthetic construct
  source 1..119: mol_type = other RNA
  modified_base 1: mod_base = OTHER; note = 2'-O-methyl modified nucleotide with phosphorothioate linkage
  modified_base 2: mod_base = OTHER; note = 2'-O-methyl modified nucleotide with phosphorothioate linkage
  modified_base 3: mod_base = OTHER; note = 2'-O-methyl modified nucleotide with phosphorothioate linkage
  modified_base 29: mod_base = OTHER; note = 2'-O-methyl modified nucleotide
  modified_base 30: mod_base = OTHER; note = 2'-O-methyl modified nucleotide
  modified_base 31: mod_base = OTHER; note = 2'-O-methyl modified nucleotide
  modified_base 32: mod_base = OTHER; note = 2'-O-methyl modified nucleotide
  modified_base 33: mod_base = OTHER; note = 2'-O-methyl modified nucleotide
  modified_base 34: mod_base = OTHER; note = 2'-O-methyl modified nucleotide
  modified_base 35: mod_base = OTHER; note = 2'-O-methyl modified nucleotide
  modified_base 36: mod_base = OTHER; note = 2'-O-methyl modified nucleotide
  modified_base 37: mod_base = OTHER; note = 2'-O-methyl modified nucleotide
  modified_base 38: mod_base = OTHER; note = 2'-O-methyl modified nucleotide
  modified_base 39: mod_base = OTHER; note = 2'-O-methyl modified nucleotide
  modified_base 40: mod_base = OTHER; note = 2'-O-methyl modified nucleotide
  modified_base 69: mod_base = OTHER; note = 2'-O-methyl modified nucleotide
  modified_base 70: mod_base = OTHER; note = 2'-O-methyl modified nucleotide
  modified_base 71: mod_base = OTHER; note = 2'-O-methyl modified nucleotide
  modified_base 72: mod_base = OTHER; note = 2'-O-methyl modified nucleotide
  modified_base 73: mod_base = OTHER; note = 2'-O-methyl modified nucleotide
  modified_base 74: mod_base = OTHER; note = 2'-O-methyl modified nucleotide
  modified_base 75: mod_base = OTHER; note = 2'-O-methyl modified nucleotide
  modified_base 76: mod_base = OTHER; note = 2'-O-methyl modified nucleotide
  modified_base 77: mod_base = OTHER; note = 2'-O-methyl modified nucleotide
  modified_base 78: mod_base = OTHER; note = 2'-O-methyl modified nucleotide
  modified_base 79: mod_base = OTHER; note = 2'-O-methyl modified nucleotide
  modified_base 80: mod_base = OTHER; note = 2'-O-methyl modified nucleotide
  modified_base 81: mod_base = OTHER; note = 2'-O-methyl modified nucleotide
  modified_base 82: mod_base = OTHER; note = 2'-O-methyl modified nucleotide
  modified_base 83: mod_base = OTHER; note = 2'-O-methyl modified nucleotide
  modified_base 84: mod_base = OTHER; note = 2'-O-methyl modified nucleotide
  modified_base 85: mod_base = OTHER; note = 2'-O-methyl modified nucleotide
  modified_base 86: mod_base = OTHER; note = 2'-O-methyl modified nucleotide
  modified_base 87: mod_base = OTHER; note = 2'-O-methyl modified nucleotide
  modified_base 88: mod_base = OTHER; note = 2'-O-methyl modified nucleotide
  modified_base 89: mod_base = OTHER; note = 2'-O-methyl modified nucleotide
  modified_base 90: mod_base = OTHER; note = 2'-O-methyl modified nucleotide
  modified_base 91: mod_base = OTHER; note = 2'-O-methyl modified nucleotide
  modified_base 92: mod_base = OTHER; note = 2'-O-methyl modified nucleotide
  modified_base 93: mod_base = OTHER; note = 2'-O-methyl modified nucleotide
  modified_base 94: mod_base = OTHER; note = 2'-O-methyl modified nucleotide
  modified_base 95: mod_base = OTHER; note = 2'-O-methyl modified nucleotide
  modified_base 96: mod_base = OTHER; note = 2'-O-methyl modified nucleotide
  modified_base 116: mod_base = OTHER; note = Nucleotide with phosphorothioate linkage
  modified_base 117: mod_base = OTHER; note = 2'-O-methyl modified nucleotide with phosphorothioate linkage
  modified_base 118: mod_base = OTHER; note = 2'-O-methyl modified nucleotide with phosphorothioate linkage
  modified_base 119: mod_base = OTHER; note = 2'-O-methyl modified nucleotide
gagtagcgcgagcacagctagttttagagctagaaatagcaagttaaaataaggctagtccgttatcaacttgaaaaagtggcaccgagtcggtgctggccttagtgatctgtgctcgc

SEQ ID NO: 17701 - RNA, 118 nt, synthetic construct
  source 1..118: mol_type = other RNA
  modified_base 1: mod_base = OTHER; note = 2'-O-methyl modified nucleotide with phosphorothioate linkage
  modified_base 2: mod_base = OTHER; note = 2'-O-methyl modified nucleotide with phosphorothioate linkage
  modified_base 3: mod_base = OTHER; note = 2'-O-methyl modified nucleotide with phosphorothioate linkage
  modified_base 29: mod_base = OTHER; note = 2'-O-methyl modified nucleotide
  modified_base 30: mod_base = OTHER; note = 2'-O-methyl modified nucleotide
  modified_base 31: mod_base = OTHER; note = 2'-O-methyl modified nucleotide
  modified_base 32: mod_base = OTHER; note = 2'-O-methyl modified nucleotide
  modified_base 33: mod_base = OTHER; note = 2'-O-methyl modified nucleotide
  modified_base 34: mod_base = OTHER; note = 2'-O-methyl modified nucleotide
  modified_base 35: mod_base = OTHER; note = 2'-O-methyl modified nucleotide
  modified_base 36: mod_base = OTHER; note = 2'-O-methyl modified nucleotide
  modified_base 37: mod_base = OTHER; note = 2'-O-methyl modified nucleotide
  modified_base 38: mod_base = OTHER; note = 2'-O-methyl modified nucleotide
  modified_base 39: mod_base = OTHER; note = 2'-O-methyl modified nucleotide
  modified_base 40: mod_base = OTHER; note = 2'-O-methyl modified nucleotide
  modified_base 69: mod_base = OTHER; note = 2'-O-methyl modified nucleotide
  modified_base 70: mod_base = OTHER; note = 2'-O-methyl modified nucleotide
  modified_base 71: mod_base = OTHER; note = 2'-O-methyl modified nucleotide
  modified_base 72: mod_base = OTHER; note = 2'-O-methyl modified nucleotide
  modified_base 73: mod_base = OTHER; note = 2'-O-methyl modified nucleotide
  modified_base 74: mod_base = OTHER; note = 2'-O-methyl modified nucleotide
  modified_base 75: mod_base = OTHER; note = 2'-O-methyl modified nucleotide
  modified_base 76: mod_base = OTHER; note = 2'-O-methyl modified nucleotide
  modified_base 77: mod_base = OTHER; note = 2'-O-methyl modified nucleotide
  modified_base 78: mod_base = OTHER; note = 2'-O-methyl modified nucleotide
  modified_base 79: mod_base = OTHER; note = 2'-O-methyl modified nucleotide
  modified_base 80: mod_base = OTHER; note = 2'-O-methyl modified nucleotide
  modified_base 81: mod_base = OTHER; note = 2'-O-methyl modified nucleotide
  modified_base 82: mod_base = OTHER; note = 2'-O-methyl modified nucleotide
  modified_base 83: mod_base = OTHER; note = 2'-O-methyl modified nucleotide
  modified_base 84: mod_base = OTHER; note = 2'-O-methyl modified nucleotide
  modified_base 85: mod_base = OTHER; note = 2'-O-methyl modified nucleotide
  modified_base 86: mod_base = OTHER; note = 2'-O-methyl modified nucleotide
  modified_base 87: mod_base = OTHER; note = 2'-O-methyl modified nucleotide
  modified_base 88: mod_base = OTHER; note = 2'-O-methyl modified nucleotide
  modified_base 89: mod_base = OTHER; note = 2'-O-methyl modified nucleotide
  modified_base 90: mod_base = OTHER; note = 2'-O-methyl modified nucleotide
  modified_base 91: mod_base = OTHER; note = 2'-O-methyl modified nucleotide
  modified_base 92: mod_base = OTHER; note = 2'-O-methyl modified nucleotide
  modified_base 93: mod_base = OTHER; note = 2'-O-methyl modified nucleotide
  modified_base 94: mod_base = OTHER; note = 2'-O-methyl modified nucleotide
  modified_base 95: mod_base = OTHER; note = 2'-O-methyl modified nucleotide
  modified_base 96: mod_base = OTHER; note = 2'-O-methyl modified nucleotide
  modified_base 115: mod_base = OTHER; note = Nucleotide with phosphorothioate linkage
  modified_base 116: mod_base = OTHER; note = 2'-O-methyl modified nucleotide with phosphorothioate linkage
  modified_base 117: mod_base = OTHER; note = 2'-O-methyl modified nucleotide with phosphorothioate linkage
  modified_base 118: mod_base = OTHER; note = 2'-O-methyl modified nucleotide
gagtagcgcgagcacagctagttttagagctagaaatagcaagttaaaataaggctagtccgttatcaacttgaaaaagtggcaccgagtcggtgctggccttagtgatctgtgctcg

SEQ ID NO: 17702 - RNA, 117 nt, synthetic construct
  source 1..117: mol_type = other RNA
  modified_base 1: mod_base = OTHER; note = 2'-O-methyl modified nucleotide with phosphorothioate linkage
  modified_base 2: mod_base = OTHER; note = 2'-O-methyl modified nucleotide with phosphorothioate linkage
  modified_base 3: mod_base = OTHER; note = 2'-O-methyl modified nucleotide with phosphorothioate linkage
  modified_base 29: mod_base = OTHER; note = 2'-O-methyl modified nucleotide
  modified_base 30: mod_base = OTHER; note = 2'-O-methyl modified nucleotide
  modified_base 31: mod_base = OTHER; note = 2'-O-methyl modified nucleotide
  modified_base 32: mod_base = OTHER; note = 2'-O-methyl modified nucleotide
  modified_base 33: mod_base = OTHER; note = 2'-O-methyl modified nucleotide
  modified_base 34: mod_base = OTHER; note = 2'-O-methyl modified nucleotide
  modified_base 35: mod_base = OTHER; note = 2'-O-methyl modified nucleotide
  modified_base 36: mod_base = OTHER; note = 2'-O-methyl modified nucleotide
  modified_base 37: mod_base = OTHER; note = 2'-O-methyl modified nucleotide
  modified_base 38: mod_base = OTHER; note = 2'-O-methyl modified nucleotide
  modified_base 39: mod_base = OTHER; note = 2'-O-methyl modified nucleotide
  modified_base 40: mod_base = OTHER; note = 2'-O-methyl modified nucleotide
  modified_base 69: mod_base = OTHER; note = 2'-O-methyl modified nucleotide
  modified_base 70: mod_base = OTHER; note = 2'-O-methyl modified nucleotide
  modified_base 71: mod_base = OTHER; note = 2'-O-methyl modified nucleotide
  modified_base 72: mod_base = OTHER; note = 2'-O-methyl modified nucleotide
  modified_base 73: mod_base = OTHER; note = 2'-O-methyl modified nucleotide
  modified_base 74: mod_base = OTHER; note = 2'-O-methyl modified nucleotide
  modified_base 75: mod_base = OTHER; note = 2'-O-methyl modified nucleotide
  modified_base 76: mod_base = OTHER; note = 2'-O-methyl modified nucleotide
  modified_base 77: mod_base = OTHER; note = 2'-O-methyl modified nucleotide
  modified_base 78: mod_base = OTHER; note = 2'-O-methyl modified nucleotide
  modified_base 79: mod_base = OTHER; note = 2'-O-methyl modified nucleotide
  modified_base 80: mod_base = OTHER; note = 2'-O-methyl modified nucleotide
  modified_base 81: mod_base = OTHER; note = 2'-O-methyl modified nucleotide
  modified_base 82: mod_base = OTHER; note = 2'-O-methyl modified nucleotide
  modified_base 83: mod_base = OTHER; note = 2'-O-methyl modified nucleotide
  modified_base 84: mod_base = OTHER; note = 2'-O-methyl modified nucleotide
  modified_base 85: mod_base = OTHER; note = 2'-O-methyl modified nucleotide
  modified_base 86: mod_base = OTHER; note = 2'-O-methyl modified nucleotide
  modified_base 87: mod_base = OTHER; note = 2'-O-methyl modified nucleotide
  modified_base 88: mod_base = OTHER; note = 2'-O-methyl modified nucleotide
  modified_base 89: mod_base = OTHER; note = 2'-O-methyl modified nucleotide
  modified_base 90: mod_base = OTHER; note = 2'-O-methyl modified nucleotide
  modified_base 91: mod_base = OTHER; note = 2'-O-methyl modified nucleotide
  modified_base 92: mod_base = OTHER; note = 2'-O-methyl modified nucleotide
  modified_base 93: mod_base = OTHER; note = 2'-O-methyl modified nucleotide
  modified_base 94: mod_base = OTHER; note = 2'-O-methyl modified nucleotide
  modified_base 95: mod_base = OTHER; note = 2'-O-methyl modified nucleotide
  modified_base 96: mod_base = OTHER; note = 2'-O-methyl modified nucleotide
  modified_base 114: mod_base = OTHER; note = Nucleotide with phosphorothioate linkage
  modified_base 115: mod_base = OTHER; note = 2'-O-methyl modified nucleotide with phosphorothioate linkage
  modified_base 116: mod_base = OTHER; note = 2'-O-methyl modified nucleotide with phosphorothioate linkage
  modified_base 117: mod_base = OTHER; note = 2'-O-methyl modified nucleotide
gagtagcgcgagcacagctagttttagagctagaaatagcaagttaaaataaggctagtccgttatcaacttgaaaaagtggcaccgagtcggtgctggccttagtgatctgtgctc

SEQ ID NO: 17703 - RNA, 124 nt, synthetic construct
  source 1..124: mol_type = other RNA
  modified_base 1: mod_base = OTHER; note = 2'-O-methyl modified nucleotide with phosphorothioate linkage
  modified_base 2: mod_base = OTHER; note = 2'-O-methyl modified nucleotide with phosphorothioate linkage
  modified_base 3: mod_base = OTHER; note = 2'-O-methyl modified nucleotide with phosphorothioate linkage
  modified_base 29: mod_base = OTHER; note = 2'-O-methyl modified nucleotide
  modified_base 30: mod_base = OTHER; note = 2'-O-methyl modified nucleotide
  modified_base 31: mod_base = OTHER; note = 2'-O-methyl modified nucleotide
  modified_base 32: mod_base = OTHER; note = 2'-O-methyl modified nucleotide
  modified_base 33: mod_base = OTHER; note = 2'-O-methyl modified nucleotide
  modified_base 34: mod_base = OTHER; note = 2'-O-methyl modified nucleotide
  modified_base 35: mod_base = OTHER; note = 2'-O-methyl modified nucleotide
  modified_base 36: mod_base = OTHER; note = 2'-O-methyl modified nucleotide
  modified_base 37: mod_base = OTHER; note = 2'-O-methyl modified nucleotide
  modified_base 38: mod_base = OTHER; note = 2'-O-methyl modified nucleotide
  modified_base 39: mod_base = OTHER; note = 2'-O-methyl modified nucleotide
  modified_base 40: mod_base = OTHER; note = 2'-O-methyl modified nucleotide
  modified_base 69: mod_base = OTHER; note = 2'-O-methyl modified nucleotide
  modified_base 70: mod_base = OTHER; note = 2'-O-methyl modified nucleotide
  modified_base 71: mod_base = OTHER; note = 2'-O-methyl modified nucleotide
  modified_base 72: mod_base = OTHER; note = 2'-O-methyl modified nucleotide
  modified_base 73: mod_base = OTHER; note = 2'-O-methyl modified nucleotide
  modified_base 74: mod_base = OTHER; note = 2'-O-methyl modified nucleotide
  modified_base 75: mod_base = OTHER; note = 2'-O-methyl modified nucleotide
  modified_base 76: mod_base = OTHER; note = 2'-O-methyl modified nucleotide
  modified_base 77: mod_base = OTHER; note = 2'-O-methyl modified nucleotide
  modified_base 78: mod_base = OTHER; note = 2'-O-methyl modified nucleotide
  modified_base 79: mod_base = OTHER; note = 2'-O-methyl modified nucleotide
  modified_base 80: mod_base = OTHER; note = 2'-O-methyl modified nucleotide
  modified_base 81: mod_base = OTHER; note = 2'-O-methyl modified nucleotide
  modified_base 82: mod_base = OTHER; note = 2'-O-methyl modified nucleotide
  modified_base 83: mod_base = OTHER; note = 2'-O-methyl modified nucleotide
  modified_base 84: mod_base = OTHER; note = 2'-O-methyl modified nucleotide
  modified_base 85: mod_base = OTHER; note = 2'-O-methyl modified nucleotide
  modified_base 86: mod_base = OTHER; note = 2'-O-methyl modified nucleotide
  modified_base 87: mod_base = OTHER; note = 2'-O-methyl modified nucleotide
  modified_base 88: mod_base = OTHER; note = 2'-O-methyl modified nucleotide
  modified_base 89: mod_base = OTHER; note = 2'-O-methyl modified nucleotide
  modified_base 90: mod_base = OTHER; note = 2'-O-methyl modified nucleotide
  modified_base 91: mod_base = OTHER; note = 2'-O-methyl modified nucleotide
  modified_base 92: mod_base = OTHER; note = 2'-O-methyl modified nucleotide
  modified_base 93: mod_base = OTHER; note = 2'-O-methyl modified nucleotide
  modified_base 94: mod_base = OTHER; note = 2'-O-methyl modified nucleotide
  modified_base 95: mod_base = OTHER; note = 2'-O-methyl modified nucleotide
  modified_base 96: mod_base = OTHER; note = 2'-O-methyl modified nucleotide
  modified_base 121: mod_base = OTHER; note = Nucleotide with phosphorothioate linkage
  modified_base 122: mod_base = OTHER; note = 2'-O-methyl modified nucleotide with phosphorothioate linkage
  modified_base 123: mod_base = OTHER; note = 2'-O-methyl modified nucleotide with phosphorothioate linkage
  modified_base 124: mod_base = OTHER; note = 2'-O-methyl modified nucleotide
gagtagcgcgagcacagctagttttagagctagaaatagcaagttaaaataaggctagtccgttatcaacttgaaaaagtggcaccgagtcggtgccgtggccttagtgatctgtgctcgcgct

SEQ ID NO: 17704 - RNA, 123 nt, synthetic construct
  source 1..123: mol_type = other RNA
  modified_base 1: mod_base = OTHER; note = 2'-O-methyl modified nucleotide with phosphorothioate linkage
  modified_base 2: mod_base = OTHER; note = 2'-O-methyl modified nucleotide with phosphorothioate linkage
  modified_base 3: mod_base = OTHER; note = 2'-O-methyl modified nucleotide with phosphorothioate linkage
  modified_base 29: mod_base = OTHER; note = 2'-O-methyl modified nucleotide
  modified_base 30: mod_base = OTHER; note = 2'-O-methyl modified nucleotide
  modified_base 31: mod_base = OTHER; note = 2'-O-methyl modified nucleotide
  modified_base 32: mod_base = OTHER; note = 2'-O-methyl modified nucleotide
  modified_base 33: mod_base = OTHER; note = 2'-O-methyl modified nucleotide
  modified_base 34: mod_base = OTHER; note = 2'-O-methyl modified nucleotide
  modified_base 35: mod_base = OTHER; note = 2'-O-methyl modified nucleotide
  modified_base 36: mod_base = OTHER; note = 2'-O-methyl modified nucleotide
  modified_base 37: mod_base = OTHER; note = 2'-O-methyl modified nucleotide
  modified_base 38: mod_base = OTHER; note = 2'-O-methyl modified nucleotide
  modified_base 39: mod_base = OTHER; note = 2'-O-methyl modified nucleotide
  modified_base 40: mod_base = OTHER; note = 2'-O-methyl modified nucleotide
  modified_base 69: mod_base = OTHER; note = 2'-O-methyl modified nucleotide
  modified_base 70: mod_base = OTHER; note = 2'-O-methyl modified nucleotide
  modified_base 71: mod_base = OTHER; note = 2'-O-methyl modified nucleotide
  modified_base 72: mod_base = OTHER; note = 2'-O-methyl modified nucleotide
  modified_base 73: mod_base = OTHER; note = 2'-O-methyl modified nucleotide
  modified_base 74: mod_base = OTHER; note = 2'-O-methyl modified nucleotide
  modified_base 75: mod_base = OTHER; note = 2'-O-methyl modified nucleotide
  modified_base 76: mod_base = OTHER; note = 2'-O-methyl modified nucleotide
  modified_base 77: mod_base = OTHER; note = 2'-O-methyl modified nucleotide
  modified_base 78: mod_base = OTHER; note = 2'-O-methyl modified nucleotide
  modified_base 79: mod_base = OTHER; note = 2'-O-methyl modified nucleotide
  modified_base 80: mod_base = OTHER; note = 2'-O-methyl modified nucleotide
  modified_base 81: mod_base = OTHER; note = 2'-O-methyl modified nucleotide
  modified_base 82: mod_base = OTHER; note = 2'-O-methyl modified nucleotide
  modified_base 83: mod_base = OTHER; note = 2'-O-methyl modified nucleotide
  modified_base 84: mod_base = OTHER; note = 2'-O-methyl modified nucleotide
  modified_base 85: mod_base = OTHER; note = 2'-O-methyl modified nucleotide
  modified_base 86: mod_base = OTHER; note = 2'-O-methyl modified nucleotide
  modified_base 87: mod_base = OTHER; note = 2'-O-methyl modified nucleotide
  modified_base 88: mod_base = OTHER; note = 2'-O-methyl modified nucleotide
  modified_base 89: mod_base = OTHER; note = 2'-O-methyl modified nucleotide
  modified_base 90: mod_base = OTHER; note = 2'-O-methyl modified nucleotide
  modified_base 91: mod_base = OTHER; note = 2'-O-methyl modified nucleotide
  modified_base 92: mod_base = OTHER; note = 2'-O-methyl modified nucleotide
  modified_base 93: mod_base = OTHER; note = 2'-O-methyl modified nucleotide
  modified_base 94: mod_base = OTHER; note = 2'-O-methyl modified nucleotide
  modified_base 95: mod_base = OTHER; note = 2'-O-methyl modified nucleotide
  modified_base 96: mod_base = OTHER; note = 2'-O-methyl modified nucleotide
  modified_base 120: mod_base = OTHER; note = Nucleotide with phosphorothioate linkage
  modified_base 121: mod_base = OTHER; note = 2'-O-methyl modified nucleotide with phosphorothioate linkage
  modified_base 122: mod_base = OTHER; note = 2'-O-methyl modified nucleotide with phosphorothioate linkage
  modified_base 123: mod_base = OTHER; note = 2'-O-methyl modified nucleotide
gagtagcgcgagcacagctagttttagagctagaaatagcaagttaaaataaggctagtccgttatcaacttgaaaaagtggcaccgagtcggtgccgtggccttagtgatctgtgctcgcgc

SEQ ID NO: 17705 - RNA, 122 nt, synthetic construct
  source 1..122: mol_type = other RNA
  modified_base 1: mod_base = OTHER; note = 2'-O-methyl modified nucleotide with phosphorothioate linkage
  modified_base 2: mod_base = OTHER; note = 2'-O-methyl modified nucleotide with phosphorothioate linkage
  modified_base 3: mod_base = OTHER; note = 2'-O-methyl modified nucleotide with phosphorothioate linkage
  modified_base 29: mod_base = OTHER; note = 2'-O-methyl modified nucleotide
  modified_base 30: mod_base = OTHER; note = 2'-O-methyl modified nucleotide
  modified_base 31: mod_base = OTHER; note = 2'-O-methyl modified nucleotide
  modified_base 32: mod_base = OTHER; note = 2'-O-methyl modified nucleotide
  modified_base 33: mod_base = OTHER; note = 2'-O-methyl modified nucleotide
  modified_base 34: mod_base = OTHER; note = 2'-O-methyl modified nucleotide
  modified_base 35: mod_base = OTHER; note = 2'-O-methyl modified nucleotide
  modified_base 36: mod_base = OTHER; note = 2'-O-methyl modified nucleotide
  modified_base 37: mod_base = OTHER; note = 2'-O-methyl modified nucleotide
  modified_base 38: mod_base = OTHER; note = 2'-O-methyl modified nucleotide
  modified_base 39: mod_base = OTHER; note = 2'-O-methyl modified nucleotide
  modified_base 40: mod_base = OTHER; note = 2'-O-methyl modified nucleotide
  modified_base 69: mod_base = OTHER; note = 2'-O-methyl modified nucleotide
  modified_base 70: mod_base = OTHER; note = 2'-O-methyl modified nucleotide
  modified_base 71: mod_base = OTHER; note = 2'-O-methyl modified nucleotide
  modified_base 72: mod_base = OTHER; note = 2'-O-methyl modified nucleotide
  modified_base 73: mod_base = OTHER; note = 2'-O-methyl modified nucleotide
  modified_base 74: mod_base = OTHER; note = 2'-O-methyl modified nucleotide
  modified_base 75: mod_base = OTHER; note = 2'-O-methyl modified nucleotide
  modified_base 76: mod_base = OTHER; note = 2'-O-methyl modified nucleotide
  modified_base 77: mod_base = OTHER; note = 2'-O-methyl modified nucleotide
  modified_base 78: mod_base = OTHER; note = 2'-O-methyl modified nucleotide
  modified_base 79: mod_base = OTHER; note = 2'-O-methyl modified nucleotide
  modified_base 80: mod_base = OTHER; note = 2'-O-methyl modified nucleotide
  modified_base 81: mod_base = OTHER; note = 2'-O-methyl modified nucleotide
  modified_base 82: mod_base = OTHER; note = 2'-O-methyl modified nucleotide
  modified_base 83: mod_base = OTHER; note = 2'-O-methyl modified nucleotide
  modified_base 84: mod_base = OTHER; note = 2'-O-methyl modified nucleotide
  modified_base 85: mod_base = OTHER; note = 2'-O-methyl modified nucleotide
  modified_base 86: mod_base = OTHER; note = 2'-O-methyl modified nucleotide
  modified_base 87: mod_base = OTHER; note = 2'-O-methyl modified nucleotide
  modified_base 88: mod_base = OTHER; note = 2'-O-methyl modified nucleotide
  modified_base 89: mod_base = OTHER; note = 2'-O-methyl modified nucleotide
  modified_base 90: mod_base = OTHER; note = 2'-O-methyl modified nucleotide
  modified_base 91: mod_base = OTHER; note = 2'-O-methyl modified nucleotide
  modified_base 92: mod_base = OTHER; note = 2'-O-methyl modified nucleotide
  modified_base 93: mod_base = OTHER; note = 2'-O-methyl modified nucleotide
  modified_base 94: mod_base = OTHER; note = 2'-O-methyl modified nucleotide
  modified_base 95: mod_base = OTHER; note = 2'-O-methyl modified nucleotide
  modified_base 96: mod_base = OTHER; note = 2'-O-methyl modified nucleotide
  modified_base 119: mod_base = OTHER; note = Nucleotide with phosphorothioate linkage
  modified_base 120: mod_base = OTHER; note = 2'-O-methyl modified nucleotide with phosphorothioate linkage
  modified_base 121: mod_base = OTHER; note = 2'-O-methyl modified nucleotide with phosphorothioate linkage
  modified_base 122: mod_base = OTHER; note = 2'-O-methyl modified nucleotide
gagtagcgcgagcacagctagttttagagctagaaatagcaagttaaaataaggctagtccgttatcaacttgaaaaagtggcaccgagtcggtgccgtggccttagtgatctgtgctcgcg

SEQ ID NO: 17706 - RNA, 121 nt, synthetic construct
  source 1..121: mol_type = other RNA
  modified_base 1: mod_base = OTHER; note = 2'-O-methyl modified nucleotide with phosphorothioate linkage
  modified_base 2: mod_base = OTHER; note = 2'-O-methyl modified nucleotide with phosphorothioate linkage
  modified_base 3: mod_base = OTHER; note = 2'-O-methyl modified nucleotide with phosphorothioate linkage
  modified_base 29: mod_base = OTHER; note = 2'-O-methyl modified nucleotide
  modified_base 30: mod_base = OTHER; note = 2'-O-methyl modified nucleotide
  modified_base 31: mod_base = OTHER; note = 2'-O-methyl modified nucleotide
  modified_base 32: mod_base = OTHER; note = 2'-O-methyl modified nucleotide
  modified_base 33: mod_base = OTHER; note = 2'-O-methyl modified nucleotide
  modified_base 34: mod_base = OTHER; note = 2'-O-methyl modified nucleotide
  modified_base 35: mod_base = OTHER; note = 2'-O-methyl modified nucleotide
  modified_base 36: mod_base = OTHER; note = 2'-O-methyl modified nucleotide
  modified_base 37: mod_base = OTHER; note = 2'-O-methyl modified nucleotide
  modified_base 38: mod_base = OTHER; note = 2'-O-methyl modified nucleotide
  modified_base 39: mod_base = OTHER; note = 2'-O-methyl modified nucleotide
  modified_base 40: mod_base = OTHER; note = 2'-O-methyl modified nucleotide
  modified_base 69: mod_base = OTHER; note = 2'-O-methyl modified nucleotide
  modified_base 70: mod_base = OTHER; note = 2'-O-methyl modified nucleotide
  modified_base 71: mod_base = OTHER; note = 2'-O-methyl modified nucleotide
  modified_base 72: mod_base = OTHER; note = 2'-O-methyl modified nucleotide
  modified_base 73: mod_base = OTHER; note = 2'-O-methyl modified nucleotide
  modified_base 74: mod_base = OTHER; note = 2'-O-methyl modified nucleotide
  modified_base 75: mod_base = OTHER; note = 2'-O-methyl modified nucleotide
  modified_base 76: mod_base = OTHER; note = 2'-O-methyl modified nucleotide
  modified_base 77: mod_base = OTHER; note = 2'-O-methyl modified nucleotide
  modified_base 78: mod_base = OTHER; note = 2'-O-methyl modified nucleotide
  modified_base 79: mod_base = OTHER; note = 2'-O-methyl modified nucleotide
  modified_base 80: mod_base = OTHER; note = 2'-O-methyl modified nucleotide
  modified_base 81: mod_base = OTHER; note = 2'-O-methyl modified nucleotide
  modified_base 82: mod_base = OTHER; note = 2'-O-methyl modified nucleotide
  modified_base 83: mod_base = OTHER; note = 2'-O-methyl modified nucleotide
  modified_base 84: mod_base = OTHER; note = 2'-O-methyl modified nucleotide
  modified_base 85: mod_base = OTHER; note = 2'-O-methyl modified nucleotide
  modified_base 86: mod_base = OTHER; note = 2'-O-methyl modified nucleotide
  modified_base 87: mod_base = OTHER; note = 2'-O-methyl modified nucleotide
  modified_base 88: mod_base = OTHER; note = 2'-O-methyl modified nucleotide
  modified_base 89: mod_base = OTHER; note = 2'-O-methyl modified nucleotide
  modified_base 90: mod_base = OTHER; note = 2'-O-methyl modified nucleotide
  modified_base 91: mod_base = OTHER; note = 2'-O-methyl modified nucleotide
  modified_base 92: mod_base = OTHER; note = 2'-O-methyl modified nucleotide
  modified_base 93: mod_base = OTHER; note = 2'-O-methyl modified nucleotide
  modified_base 94: mod_base = OTHER; note = 2'-O-methyl modified nucleotide
  modified_base 95: mod_base = OTHER; note = 2'-O-methyl modified nucleotide
  modified_base 96: mod_base = OTHER; note = 2'-O-methyl modified nucleotide
  modified_base 118: mod_base = OTHER; note = Nucleotide with phosphorothioate linkage
  modified_base 119: mod_base = OTHER; note = 2'-O-methyl modified nucleotide with phosphorothioate linkage
  modified_base 120: mod_base = OTHER; note = 2'-O-methyl modified nucleotide with phosphorothioate linkage
  modified_base 121: mod_base = OTHER; note = 2'-O-methyl modified nucleotide
gagtagcgcgagcacagctagttttagagctagaaatagcaagttaaaataaggctagtccgttatcaacttgaaaaagtggcaccgagtcggtgccgtggccttagtgatctgtgctcgc

SEQ ID NO: 17707 - RNA, 120 nt, synthetic construct
  source 1..120: mol_type = other RNA
  modified_base 1: mod_base = OTHER; note = 2'-O-methyl modified nucleotide with phosphorothioate linkage
  modified_base 2: mod_base = OTHER; note = 2'-O-methyl modified nucleotide with phosphorothioate linkage
  modified_base 3: mod_base = OTHER; note = 2'-O-methyl modified nucleotide with phosphorothioate linkage
  modified_base 29: mod_base = OTHER; note = 2'-O-methyl modified nucleotide
  modified_base 30: mod_base = OTHER; note = 2'-O-methyl modified nucleotide
  modified_base 31: mod_base = OTHER; note = 2'-O-methyl modified nucleotide
  modified_base 32: mod_base = OTHER; note = 2'-O-methyl modified nucleotide
  modified_base 33: mod_base = OTHER; note = 2'-O-methyl modified nucleotide
  modified_base 34: mod_base = OTHER; note = 2'-O-methyl modified nucleotide
  modified_base 35: mod_base = OTHER; note = 2'-O-methyl modified nucleotide
  modified_base 36: mod_base = OTHER; note = 2'-O-methyl modified nucleotide
  modified_base 37: mod_base = OTHER; note = 2'-O-methyl modified nucleotide
  modified_base 38: mod_base = OTHER; note = 2'-O-methyl modified nucleotide
  modified_base 39: mod_base = OTHER; note = 2'-O-methyl modified nucleotide
  modified_base 40: mod_base = OTHER; note = 2'-O-methyl modified nucleotide
  modified_base 69: mod_base = OTHER; note = 2'-O-methyl modified nucleotide
  modified_base 70: mod_base = OTHER; note = 2'-O-methyl modified nucleotide
  modified_base 71: mod_base = OTHER; note = 2'-O-methyl modified nucleotide
  modified_base 72: mod_base = OTHER; note = 2'-O-methyl modified nucleotide
  modified_base 73: mod_base = OTHER; note = 2'-O-methyl modified nucleotide
  modified_base 74: mod_base = OTHER; note = 2'-O-methyl modified nucleotide
  modified_base 75: mod_base = OTHER; note = 2'-O-methyl modified nucleotide
  modified_base 76: mod_base = OTHER; note = 2'-O-methyl modified nucleotide
  modified_base 77: mod_base = OTHER; note = 2'-O-methyl modified nucleotide
  modified_base 78: mod_base = OTHER; note = 2'-O-methyl modified nucleotide
  modified_base 79: mod_base = OTHER; note = 2'-O-methyl modified nucleotide
  modified_base 80: mod_base = OTHER; note = 2'-O-methyl modified nucleotide
  modified_base 81: mod_base = OTHER; note = 2'-O-methyl modified nucleotide
  modified_base 82: mod_base = OTHER; note = 2'-O-methyl modified nucleotide
  modified_base 83: mod_base = OTHER; note = 2'-O-methyl modified nucleotide
  modified_base 84: mod_base = OTHER; note = 2'-O-methyl modified nucleotide
  modified_base 85: mod_base = OTHER; note = 2'-O-methyl modified nucleotide
  modified_base 86: mod_base = OTHER; note = 2'-O-methyl modified nucleotide
  modified_base 87: mod_base = OTHER; note = 2'-O-methyl modified nucleotide
  modified_base 88: mod_base = OTHER; note = 2'-O-methyl modified nucleotide
  modified_base 89: mod_base = OTHER; note = 2'-O-methyl modified nucleotide
  modified_base 90: mod_base = OTHER; note = 2'-O-methyl modified nucleotide
  modified_base 91: mod_base = OTHER; note = 2'-O-methyl modified nucleotide
  modified_base 92: mod_base = OTHER; note = 2'-O-methyl modified nucleotide
  modified_base 93: mod_base = OTHER; note = 2'-O-methyl modified nucleotide
  modified_base 94: mod_base = OTHER; note = 2'-O-methyl modified nucleotide
  modified_base 95: mod_base = OTHER; note = 2'-O-methyl modified nucleotide
  modified_base 96: mod_base = OTHER; note = 2'-O-methyl modified nucleotide
  modified_base 117: mod_base = OTHER; note = Nucleotide with phosphorothioate linkage
  modified_base 118: mod_base = OTHER; note = 2'-O-methyl modified nucleotide with phosphorothioate linkage
  modified_base 119: mod_base = OTHER; note = 2'-O-methyl modified nucleotide with phosphorothioate linkage
  modified_base 120: mod_base = OTHER; note = 2'-O-methyl modified nucleotide
gagtagcgcgagcacagctagttttagagctagaaatagcaagttaaaataaggctagtccgttatcaacttgaaaaagtggcaccgagtcggtgccgtggccttagtgatctgtgctcg

SEQ ID NO: 17708 - RNA, 119 nt, synthetic construct
  source 1..119: mol_type = other RNA
  modified_base 1: mod_base = OTHER; note = 2'-O-methyl modified nucleotide with phosphorothioate linkage
  modified_base 2: mod_base = OTHER; note = 2'-O-methyl modified nucleotide with phosphorothioate linkage
  modified_base 3: mod_base = OTHER; note = 2'-O-methyl modified nucleotide with phosphorothioate linkage
  modified_base 29: mod_base = OTHER; note = 2'-O-methyl modified nucleotide
  modified_base 30: mod_base = OTHER; note = 2'-O-methyl modified nucleotide
  modified_base 31: mod_base = OTHER; note = 2'-O-methyl modified nucleotide
  modified_base 32: mod_base = OTHER; note = 2'-O-methyl modified nucleotide
  modified_base 33: mod_base = OTHER; note = 2'-O-methyl modified nucleotide
  modified_base 34: mod_base = OTHER; note = 2'-O-methyl modified nucleotide
  modified_base 35: mod_base = OTHER; note = 2'-O-methyl modified nucleotide
  modified_base 36: mod_base = OTHER; note = 2'-O-methyl modified nucleotide
  modified_base 37: mod_base = OTHER; note = 2'-O-methyl modified nucleotide
  modified_base 38: mod_base = OTHER; note = 2'-O-methyl modified nucleotide
  modified_base 39: mod_base = OTHER; note = 2'-O-methyl modified nucleotide
  modified_base 40: mod_base = OTHER; note = 2'-O-methyl modified nucleotide
  modified_base 69: mod_base = OTHER; note = 2'-O-methyl modified nucleotide
  modified_base 70: mod_base = OTHER; note = 2'-O-methyl modified nucleotide
  modified_base 71: mod_base = OTHER; note = 2'-O-methyl modified nucleotide
  modified_base 72: mod_base = OTHER; note = 2'-O-methyl modified nucleotide
  modified_base 73: mod_base = OTHER; note = 2'-O-methyl modified nucleotide
  modified_base 74: mod_base = OTHER; note = 2'-O-methyl modified nucleotide
  modified_base 75: mod_base = OTHER; note = 2'-O-methyl modified nucleotide
  modified_base 76: mod_base = OTHER; note = 2'-O-methyl modified nucleotide
  modified_base 77: mod_base = OTHER; note = 2'-O-methyl modified nucleotide
  modified_base 78: mod_base = OTHER; note = 2'-O-methyl modified nucleotide
  modified_base 79: mod_base = OTHER; note = 2'-O-methyl modified nucleotide
  modified_base 80: mod_base = OTHER; note = 2'-O-methyl modified nucleotide
  modified_base 81: mod_base = OTHER; note = 2'-O-methyl modified nucleotide
  modified_base 82: mod_base = OTHER; note = 2'-O-methyl modified nucleotide
  modified_base 83: mod_base = OTHER; note = 2'-O-methyl modified nucleotide
  modified_base 84: mod_base = OTHER; note = 2'-O-methyl modified nucleotide
  modified_base 85: mod_base = OTHER; note = 2'-O-methyl modified nucleotide
  modified_base 86: mod_base = OTHER; note = 2'-O-methyl modified nucleotide
  modified_base 87: mod_base = OTHER; note = 2'-O-methyl modified nucleotide
  modified_base 88: mod_base = OTHER; note = 2'-O-methyl modified nucleotide
  modified_base 89: mod_base = OTHER; note = 2'-O-methyl modified nucleotide
  modified_base 90: mod_base = OTHER; note = 2'-O-methyl modified nucleotide
  modified_base 91: mod_base = OTHER; note = 2'-O-methyl modified nucleotide
  modified_base 92: mod_base = OTHER; note = 2'-O-methyl modified nucleotide
  modified_base 93: mod_base = OTHER; note = 2'-O-methyl modified nucleotide
  modified_base 94: mod_base = OTHER; note = 2'-O-methyl modified nucleotide
  modified_base 95: mod_base = OTHER; note = 2'-O-methyl modified nucleotide
  modified_base 96: mod_base = OTHER; note = 2'-O-methyl modified nucleotide
  modified_base 116: mod_base = OTHER; note = Nucleotide with phosphorothioate linkage
  modified_base 117: mod_base = OTHER; note = 2'-O-methyl modified nucleotide with phosphorothioate linkage
  modified_base 118: mod_base = OTHER; note = 2'-O-methyl modified nucleotide with phosphorothioate linkage
  modified_base 119: mod_base = OTHER; note = 2'-O-methyl modified nucleotide
gagtagcgcgagcacagctagttttagagctagaaatagcaagttaaaataaggctagtccgttatcaacttgaaaaagtggcaccgagtcggtgccgtggccttagtgatctgtgctc

SEQ ID NO: 17709 - RNA, 126 nt, synthetic construct
  source 1..126: mol_type = other RNA
  modified_base 1: mod_base = OTHER; note = 2'-O-methyl modified nucleotide with phosphorothioate linkage
  modified_base 2: mod_base = OTHER; note = 2'-O-methyl modified nucleotide with phosphorothioate linkage
  modified_base 3: mod_base = OTHER; note = 2'-O-methyl modified nucleotide with phosphorothioate linkage
  modified_base 29: mod_base = OTHER; note = 2'-O-methyl modified nucleotide
  modified_base 30: mod_base = OTHER; note = 2'-O-methyl modified nucleotide
  modified_base 31: mod_base = OTHER; note = 2'-O-methyl modified nucleotide
  modified_base 32: mod_base = OTHER; note = 2'-O-methyl modified nucleotide
  modified_base 33: mod_base = OTHER; note = 2'-O-methyl modified nucleotide
  modified_base 34: mod_base = OTHER; note = 2'-O-methyl modified nucleotide
  modified_base 35: mod_base = OTHER; note = 2'-O-methyl modified nucleotide
  modified_base 36: mod_base = OTHER; note = 2'-O-methyl modified nucleotide
  modified_base 37: mod_base = OTHER; note = 2'-O-methyl modified nucleotide
  modified_base 38: mod_base = OTHER; note = 2'-O-methyl modified nucleotide
  modified_base 39: mod_base = OTHER; note = 2'-O-methyl modified nucleotide
  modified_base 40: mod_base = OTHER; note = 2'-O-methyl modified nucleotide
  modified_base 69: mod_base = OTHER; note = 2'-O-methyl modified nucleotide
  modified_base 70: mod_base = OTHER; note = 2'-O-methyl modified nucleotide
  modified_base 71: mod_base = OTHER; note = 2'-O-methyl modified nucleotide
  modified_base 72: mod_base = OTHER; note = 2'-O-methyl modified nucleotide
  modified_base 73: mod_base = OTHER; note = 2'-O-methyl modified nucleotide
  modified_base 74: mod_base = OTHER; note = 2'-O-methyl modified nucleotide
  modified_base 75: mod_base = OTHER; note = 2'-O-methyl modified nucleotide
  modified_base 76: mod_base = OTHER; note = 2'-O-methyl modified nucleotide
  modified_base 77: mod_base = OTHER; note = 2'-O-methyl modified nucleotide
  modified_base 78: mod_base = OTHER; note = 2'-O-methyl modified nucleotide
  modified_base 79: mod_base = OTHER; note = 2'-O-methyl modified nucleotide
  modified_base 80: mod_base = OTHER; note = 2'-O-methyl modified nucleotide
  modified_base 81: mod_base = OTHER; note = 2'-O-methyl modified nucleotide
  modified_base 82: mod_base = OTHER; note = 2'-O-methyl modified nucleotide
  modified_base 83: mod_base = OTHER; note = 2'-O-methyl modified nucleotide
  modified_base 84: mod_base = OTHER; note = 2'-O-methyl modified nucleotide
  modified_base 85: mod_base = OTHER; note = 2'-O-methyl modified nucleotide
  modified_base 86: mod_base = OTHER; note = 2'-O-methyl modified nucleotide
  modified_base 87: mod_base = OTHER; note = 2'-O-methyl modified nucleotide
  modified_base 88: mod_base = OTHER; note = 2'-O-methyl modified nucleotide
  modified_base 89: mod_base = OTHER; note = 2'-O-methyl modified nucleotide
  modified_base 90: mod_base = OTHER; note = 2'-O-methyl modified nucleotide
  modified_base 91: mod_base = OTHER; note = 2'-O-methyl modified nucleotide
  modified_base 92: mod_base = OTHER; note = 2'-O-methyl modified nucleotide
  modified_base 93: mod_base = OTHER; note = 2'-O-methyl modified nucleotide
  modified_base 94: mod_base = OTHER; note = 2'-O-methyl modified nucleotide
  modified_base 95: mod_base = OTHER; note = 2'-O-methyl modified nucleotide
  modified_base 96: mod_base = OTHER; note = 2'-O-methyl modified nucleotide
  modified_base 123: mod_base = OTHER; note = Nucleotide with phosphorothioate linkage
  modified_base 124: mod_base = OTHER; note = 2'-O-methyl modified nucleotide with phosphorothioate linkage
  modified_base 125: mod_base = OTHER; note = 2'-O-methyl modified nucleotide with phosphorothioate linkage
  modified_base 126: mod_base = OTHER; note = 2'-O-methyl modified nucleotide
gagtagcgcgagcacagctagttttagagctagaaatagcaagttaaaataaggctagtccgttatcaacttgaaaaagtggcaccgagtcggtgctccgtggccttagtgatctgtgctcgcgct

SEQ ID NO: 17710 - RNA, 125 nt, synthetic construct
  source 1..125: mol_type = other RNA
  modified_base 1: mod_base = OTHER; note = 2'-O-methyl modified nucleotide with phosphorothioate linkage
  modified_base 2: mod_base = OTHER; note = 2'-O-methyl modified nucleotide with phosphorothioate linkage
  modified_base 3: mod_base = OTHER; note = 2'-O-methyl modified nucleotide with phosphorothioate linkage
  modified_base 29: mod_base = OTHER; note = 2'-O-methyl modified nucleotide
  modified_base 30: mod_base = OTHER; note = 2'-O-methyl modified nucleotide
  modified_base 31: mod_base = OTHER; note = 2'-O-methyl modified nucleotide
  modified_base 32: mod_base = OTHER; note = 2'-O-methyl modified nucleotide
  modified_base 33: mod_base = OTHER; note = 2'-O-methyl modified nucleotide
  modified_base 34: mod_base = OTHER; note = 2'-O-methyl modified nucleotide
  modified_base 35: mod_base = OTHER; note = 2'-O-methyl modified nucleotide
  modified_base 36: mod_base = OTHER; note = 2'-O-methyl modified nucleotide
  modified_base 37: mod_base = OTHER; note = 2'-O-methyl modified nucleotide
  modified_base 38: mod_base = OTHER; note = 2'-O-methyl modified nucleotide
  modified_base 39: mod_base = OTHER; note = 2'-O-methyl modified nucleotide
  modified_base 40: mod_base = OTHER; note = 2'-O-methyl modified nucleotide
  modified_base 69: mod_base = OTHER; note = 2'-O-methyl modified nucleotide
  modified_base 70: mod_base = OTHER; note = 2'-O-methyl modified nucleotide
  modified_base 71: mod_base = OTHER; note = 2'-O-methyl modified nucleotide
  modified_base 72: mod_base = OTHER; note = 2'-O-methyl modified nucleotide
  modified_base 73: mod_base = OTHER; note = 2'-O-methyl modified nucleotide
  modified_base 74: mod_base = OTHER; note = 2'-O-methyl modified nucleotide
  modified_base 75: mod_base = OTHER; note = 2'-O-methyl modified nucleotide
  modified_base 76: mod_base = OTHER; note = 2'-O-methyl modified nucleotide
  modified_base 77: mod_base = OTHER; note = 2'-O-methyl modified nucleotide
  modified_base 78: mod_base = OTHER; note = 2'-O-methyl modified nucleotide
  modified_base 79: mod_base = OTHER; note = 2'-O-methyl modified nucleotide
  modified_base 80: mod_base = OTHER; note = 2'-O-methyl modified nucleotide
  modified_base 81: mod_base = OTHER; note = 2'-O-methyl modified nucleotide
  modified_base 82: mod_base = OTHER; note = 2'-O-methyl modified nucleotide
  modified_base 83: mod_base = OTHER; note = 2'-O-methyl modified nucleotide
  modified_base 84: mod_base = OTHER; note = 2'-O-methyl modified nucleotide
  modified_base 85: mod_base = OTHER; note = 2'-O-methyl modified nucleotide
  modified_base 86: mod_base = OTHER; note = 2'-O-methyl modified nucleotide
  modified_base 87: mod_base = OTHER; note = 2'-O-methyl modified nucleotide
  modified_base 88: mod_base = OTHER; note = 2'-O-methyl modified nucleotide
  modified_base 89: mod_base = OTHER; note = 2'-O-methyl modified nucleotide
  modified_base 90: mod_base = OTHER; note = 2'-O-methyl modified nucleotide
  modified_base 91: mod_base = OTHER; note = 2'-O-methyl modified nucleotide
  modified_base 92: mod_base = OTHER; note = 2'-O-methyl modified nucleotide
  modified_base 93: mod_base = OTHER; note = 2'-O-methyl modified nucleotide
  modified_base 94: mod_base = OTHER; note = 2'-O-methyl modified nucleotide
  modified_base 95: mod_base = OTHER; note = 2'-O-methyl modified nucleotide
  modified_base 96: mod_base = OTHER; note = 2'-O-methyl modified nucleotide
  modified_base 122: mod_base = OTHER; note = Nucleotide with phosphorothioate linkage
  modified_base 123: mod_base = OTHER; note = 2'-O-methyl modified nucleotide with phosphorothioate linkage
  modified_base 124: mod_base = OTHER; note = 2'-O-methyl modified nucleotide with phosphorothioate linkage
  modified_base 125: mod_base = OTHER; note = 2'-O-methyl modified nucleotide
gagtagcgcgagcacagctagttttagagctagaaatagcaagttaaaataaggctagtccgttatcaacttgaaaaagtggcaccgagtcggtgctccgtggccttagtgatctgtgctcgcgc

SEQ ID NO: 17711 - RNA, 124 nt, synthetic construct
  source 1..124: mol_type = other RNA
  modified_base 1: mod_base = OTHER; note = 2'-O-methyl modified nucleotide with phosphorothioate linkage
  modified_base 2: mod_base = OTHER; note = 2'-O-methyl modified nucleotide with phosphorothioate linkage
  modified_base 3: mod_base = OTHER; note = 2'-O-methyl modified nucleotide with phosphorothioate linkage
  modified_base 29: mod_base = OTHER; note = 2'-O-methyl modified nucleotide
  modified_base 30: mod_base = OTHER; note = 2'-O-methyl modified nucleotide
  modified_base 31: mod_base = OTHER; note = 2'-O-methyl modified nucleotide
  modified_base 32: mod_base = OTHER; note = 2'-O-methyl modified nucleotide
  modified_base 33: mod_base = OTHER; note = 2'-O-methyl modified nucleotide
  modified_base 34: mod_base = OTHER; note = 2'-O-methyl modified nucleotide
  modified_base 35: mod_base = OTHER; note = 2'-O-methyl modified nucleotide
  modified_base 36: mod_base = OTHER; note = 2'-O-methyl modified nucleotide
  modified_base 37: mod_base = OTHER; note = 2'-O-methyl modified nucleotide
  modified_base 38: mod_base = OTHER; note = 2'-O-methyl modified nucleotide
  modified_base 39: mod_base = OTHER; note = 2'-O-methyl modified nucleotide
  modified_base 40: mod_base = OTHER; note = 2'-O-methyl modified nucleotide
  modified_base 69: mod_base = OTHER; note = 2'-O-methyl modified nucleotide
  modified_base 70: mod_base = OTHER; note = 2'-O-methyl modified nucleotide
  modified_base 71: mod_base = OTHER; note = 2'-O-methyl modified nucleotide
  modified_base 72: mod_base = OTHER; note = 2'-O-methyl modified nucleotide
  modified_base 73: mod_base = OTHER; note = 2'-O-methyl modified nucleotide
  modified_base 74: mod_base = OTHER; note = 2'-O-methyl modified nucleotide
  modified_base 75: mod_base = OTHER; note = 2'-O-methyl modified nucleotide
  modified_base 76: mod_base = OTHER; note = 2'-O-methyl modified nucleotide
  modified_base 77: mod_base = OTHER; note = 2'-O-methyl modified nucleotide
  modified_base 78: mod_base = OTHER; note = 2'-O-methyl modified nucleotide
  modified_base 79: mod_base = OTHER; note = 2'-O-methyl modified nucleotide
  modified_base 80: mod_base = OTHER; note = 2'-O-methyl modified nucleotide
  modified_base 81: mod_base = OTHER; note = 2'-O-methyl modified nucleotide
  modified_base 82: mod_base = OTHER; note = 2'-O-methyl modified nucleotide
  modified_base 83: mod_base = OTHER; note = 2'-O-methyl modified nucleotide
  modified_base 84: mod_base = OTHER; note = 2'-O-methyl modified nucleotide
  modified_base 85: mod_base = OTHER; note = 2'-O-methyl modified nucleotide
  modified_base 86: mod_base = OTHER; note = 2'-O-methyl modified nucleotide
  modified_base 87: mod_base = OTHER; note = 2'-O-methyl modified nucleotide
  modified_base 88: mod_base = OTHER; note = 2'-O-methyl modified nucleotide
  modified_base 89: mod_base = OTHER; note = 2'-O-methyl modified nucleotide
  modified_base 90: mod_base = OTHER; note = 2'-O-methyl modified nucleotide
  modified_base 91: mod_base = OTHER; note = 2'-O-methyl modified nucleotide
  modified_base 92: mod_base = OTHER; note = 2'-O-methyl modified nucleotide
  modified_base 93: mod_base = OTHER; note = 2'-O-methyl modified nucleotide
  modified_base 94: mod_base = OTHER; note = 2'-O-methyl modified nucleotide
  modified_base 95: mod_base = OTHER; note = 2'-O-methyl modified nucleotide
  modified_base 96: mod_base = OTHER; note = 2'-O-methyl modified nucleotide
  modified_base 121: mod_base = OTHER; note = Nucleotide with phosphorothioate linkage
  modified_base 122: mod_base = OTHER; note = 2'-O-methyl modified nucleotide with phosphorothioate linkage
  modified_base 123: mod_base = OTHER; note = 2'-O-methyl modified nucleotide with phosphorothioate linkage
  modified_base 124: mod_base = OTHER; note = 2'-O-methyl modified nucleotide
gagtagcgcgagcacagctagttttagagctagaaatagcaagttaaaataaggctagtccgttatcaacttgaaaaagtggcaccgagtcggtgctccgtggccttagtgatctgtgctcgcg

SEQ ID NO: 17712 - RNA, 123 nt, synthetic construct
  source 1..123: mol_type = other RNA
  modified_base 1: mod_base = OTHER; note = 2'-O-methyl modified nucleotide with phosphorothioate linkage
  modified_base 2: mod_base = OTHER; note = 2'-O-methyl modified nucleotide with phosphorothioate linkage
  modified_base 3: mod_base = OTHER; note = 2'-O-methyl modified nucleotide with phosphorothioate linkage
  modified_base 29: mod_base = OTHER; note = 2'-O-methyl modified nucleotide
  modified_base 30: mod_base = OTHER; note = 2'-O-methyl modified nucleotide
  modified_base 31: mod_base = OTHER; note = 2'-O-methyl modified nucleotide
  modified_base 32: mod_base = OTHER; note = 2'-O-methyl modified nucleotide
  modified_base 33: mod_base = OTHER; note = 2'-O-methyl modified nucleotide
  modified_base 34: mod_base = OTHER; note = 2'-O-methyl modified nucleotide
  modified_base 35: mod_base = OTHER; note = 2'-O-methyl modified nucleotide
  modified_base 36: mod_base = OTHER; note = 2'-O-methyl modified nucleotide
  modified_base 37: mod_base = OTHER; note = 2'-O-methyl modified nucleotide
  modified_base 38: mod_base = OTHER; note = 2'-O-methyl modified nucleotide
  modified_base 39: mod_base = OTHER; note = 2'-O-methyl modified nucleotide
  modified_base 40: mod_base = OTHER; note = 2'-O-methyl modified nucleotide
  modified_base 69: mod_base = OTHER; note = 2'-O-methyl modified nucleotide
  modified_base 70: mod_base = OTHER; note = 2'-O-methyl modified nucleotide
  modified_base 71: mod_base = OTHER; note = 2'-O-methyl modified nucleotide
  modified_base 72: mod_base = OTHER; note = 2'-O-methyl modified nucleotide
  modified_base 73: mod_base = OTHER; note = 2'-O-methyl modified nucleotide
  modified_base 74: mod_base = OTHER; note = 2'-O-methyl modified nucleotide
  modified_base 75: mod_base = OTHER; note = 2'-O-methyl modified nucleotide
  modified_base 76: mod_base = OTHER; note = 2'-O-methyl modified nucleotide
  modified_base 77: mod_base = OTHER; note = 2'-O-methyl modified nucleotide
  modified_base 78: mod_base = OTHER; note = 2'-O-methyl modified nucleotide
  modified_base 79: mod_base = OTHER; note = 2'-O-methyl modified nucleotide
  modified_base 80: mod_base = OTHER; note = 2'-O-methyl modified nucleotide
  modified_base 81: mod_base = OTHER; note = 2'-O-methyl modified nucleotide
  modified_base 82: mod_base = OTHER; note = 2'-O-methyl modified nucleotide
  modified_base 83: mod_base = OTHER; note = 2'-O-methyl modified nucleotide
  modified_base 84: mod_base = OTHER; note = 2'-O-methyl modified nucleotide
  modified_base 85: mod_base = OTHER; note = 2'-O-methyl modified nucleotide
  modified_base 86: mod_base = OTHER; note = 2'-O-methyl modified nucleotide
  modified_base 87: mod_base = OTHER; note = 2'-O-methyl modified nucleotide
  modified_base 88: mod_base = OTHER; note = 2'-O-methyl modified nucleotide
  modified_base 89: mod_base = OTHER; note = 2'-O-methyl modified nucleotide
  modified_base 90: mod_base = OTHER; note = 2'-O-methyl modified nucleotide
  modified_base 91: mod_base = OTHER; note = 2'-O-methyl modified nucleotide
  modified_base 92: mod_base = OTHER; note = 2'-O-methyl modified nucleotide
  modified_base 93: mod_base = OTHER; note = 2'-O-methyl modified nucleotide
  modified_base 94: mod_base = OTHER; note = 2'-O-methyl modified nucleotide
  modified_base 95: mod_base = OTHER; note = 2'-O-methyl modified nucleotide
  modified_base 96: mod_base = OTHER; note = 2'-O-methyl modified nucleotide
  modified_base 120: mod_base = OTHER; note = Nucleotide with phosphorothioate linkage
  modified_base 121: mod_base = OTHER; note = 2'-O-methyl modified nucleotide with phosphorothioate linkage
  modified_base 122: mod_base = OTHER; note = 2'-O-methyl modified nucleotide with phosphorothioate linkage
  modified_base 123: mod_base = OTHER; note = 2'-O-methyl modified nucleotide
gagtagcgcgagcacagctagttttagagctagaaatagcaagttaaaataaggctagtccgttatcaacttgaaaaagtggcaccgagtcggtgctccgtggccttagtgatctgtgctcgc

SEQ ID NO: 17713 - RNA, 122 nt, synthetic construct
  source 1..122: mol_type = other RNA
  modified_base 1: mod_base = OTHER; note = 2'-O-methyl modified nucleotide with phosphorothioate linkage
  modified_base 2: mod_base = OTHER; note = 2'-O-methyl modified nucleotide with phosphorothioate linkage
  modified_base 3: mod_base = OTHER; note = 2'-O-methyl modified nucleotide with phosphorothioate linkage
  modified_base 29: mod_base = OTHER; note = 2'-O-methyl modified nucleotide
  modified_base 30: mod_base = OTHER; note = 2'-O-methyl modified nucleotide
  modified_base 31: mod_base = OTHER; note = 2'-O-methyl modified nucleotide
  modified_base 32: mod_base = OTHER; note = 2'-O-methyl modified nucleotide
  modified_base 33: mod_base = OTHER; note = 2'-O-methyl modified nucleotide
  modified_base 34: mod_base = OTHER; note = 2'-O-methyl modified nucleotide
  modified_base 35: mod_base = OTHER; note = 2'-O-methyl modified nucleotide
  modified_base 36: mod_base = OTHER; note = 2'-O-methyl modified nucleotide
  modified_base 37: mod_base = OTHER; note = 2'-O-methyl modified nucleotide
  modified_base 38: mod_base = OTHER; note = 2'-O-methyl modified nucleotide
  modified_base 39: mod_base = OTHER; note = 2'-O-methyl modified nucleotide
  modified_base 40: mod_base = OTHER; note = 2'-O-methyl modified nucleotide
  modified_base 69: mod_base = OTHER; note = 2'-O-methyl modified nucleotide
  modified_base 70: mod_base = OTHER; note = 2'-O-methyl modified nucleotide
  modified_base 71: mod_base = OTHER; note = 2'-O-methyl modified nucleotide
  modified_base 72: mod_base = OTHER; note = 2'-O-methyl modified nucleotide
  modified_base 73: mod_base = OTHER; note = 2'-O-methyl modified nucleotide
  modified_base 74: mod_base = OTHER; note = 2'-O-methyl modified nucleotide
  modified_base 75: mod_base = OTHER; note = 2'-O-methyl modified nucleotide
  modified_base 76: mod_base = OTHER; note = 2'-O-methyl modified nucleotide
  modified_base 77: mod_base = OTHER; note = 2'-O-methyl modified nucleotide
  modified_base 78: mod_base = OTHER; note = 2'-O-methyl modified nucleotide
  modified_base 79: mod_base = OTHER; note = 2'-O-methyl modified nucleotide
  modified_base 80: mod_base = OTHER; note = 2'-O-methyl modified nucleotide
  modified_base 81: mod_base = OTHER; note = 2'-O-methyl modified nucleotide
  modified_base 82: mod_base = OTHER; note = 2'-O-methyl modified nucleotide
  modified_base 83: mod_base = OTHER; note = 2'-O-methyl modified nucleotide
  modified_base 84: mod_base = OTHER; note = 2'-O-methyl modified nucleotide
  modified_base 85: mod_base = OTHER; note = 2'-O-methyl modified nucleotide
  modified_base 86: mod_base = OTHER; note = 2'-O-methyl modified nucleotide
  modified_base 87: mod_base = OTHER; note = 2'-O-methyl modified nucleotide
  modified_base 88: mod_base = OTHER; note = 2'-O-methyl modified nucleotide
  modified_base 89: mod_base = OTHER; note = 2'-O-methyl modified nucleotide
  modified_base 90: mod_base = OTHER; note = 2'-O-methyl modified nucleotide
  modified_base 91: mod_base = OTHER; note = 2'-O-methyl modified nucleotide
  modified_base 92: mod_base = OTHER; note = 2'-O-methyl modified nucleotide
  modified_base 93: mod_base = OTHER; note = 2'-O-methyl modified nucleotide
  modified_base 94: mod_base = OTHER; note = 2'-O-methyl modified nucleotide
  modified_base 95: mod_base = OTHER; note = 2'-O-methyl modified nucleotide
  modified_base 96: mod_base = OTHER; note = 2'-O-methyl modified nucleotide
  modified_base 119: mod_base = OTHER; note = Nucleotide with phosphorothioate linkage
  modified_base 120: mod_base = OTHER; note = 2'-O-methyl modified nucleotide with phosphorothioate linkage
  modified_base 121: mod_base = OTHER; note = 2'-O-methyl modified nucleotide with phosphorothioate linkage
  modified_base 122: mod_base = OTHER; note = 2'-O-methyl modified nucleotide
gagtagcgcgagcacagctagttttagagctagaaatagcaagttaaaataaggctagtccgttatcaacttgaaaaagtggcaccgagtcggtgctccgtggccttagtgatctgtgctcg

SEQ ID NO: 17714 - RNA, 121 nt, synthetic construct
  source 1..121: mol_type = other RNA
  modified_base 1: mod_base = OTHER; note = 2'-O-methyl modified nucleotide with phosphorothioate linkage
  modified_base 2: mod_base = OTHER; note = 2'-O-methyl modified nucleotide with phosphorothioate linkage
  modified_base 3: mod_base = OTHER; note = 2'-O-methyl modified nucleotide with phosphorothioate linkage
  modified_base 29: mod_base = OTHER; note = 2'-O-methyl modified nucleotide
  modified_base 30: mod_base = OTHER; note = 2'-O-methyl modified nucleotide
  modified_base 31: mod_base = OTHER; note = 2'-O-methyl modified nucleotide
  modified_base 32: mod_base = OTHER; note = 2'-O-methyl modified nucleotide
  modified_base 33: mod_base = OTHER; note = 2'-O-methyl modified nucleotide
  modified_base 34: mod_base = OTHER; note = 2'-O-methyl modified nucleotide
  modified_base 35: mod_base = OTHER; note = 2'-O-methyl modified nucleotide
  modified_base 36: mod_base = OTHER; note = 2'-O-methyl modified nucleotide
  modified_base 37: mod_base = OTHER; note = 2'-O-methyl modified nucleotide
  modified_base 38: mod_base = OTHER; note = 2'-O-methyl modified nucleotide
  modified_base 39: mod_base = OTHER; note = 2'-O-methyl modified nucleotide
  modified_base 40: mod_base = OTHER; note = 2'-O-methyl modified nucleotide
  modified_base 69: mod_base = OTHER; note = 2'-O-methyl modified nucleotide
  modified_base 70: mod_base = OTHER; note = 2'-O-methyl modified nucleotide
  modified_base 71: mod_base = OTHER; note = 2'-O-methyl modified nucleotide
  modified_base 72: mod_base = OTHER; note = 2'-O-methyl modified nucleotide
  modified_base 73: mod_base = OTHER; note = 2'-O-methyl modified nucleotide
  modified_base 74: mod_base = OTHER; note = 2'-O-methyl modified nucleotide
  modified_base 75: mod_base = OTHER; note = 2'-O-methyl modified nucleotide
  modified_base 76: mod_base = OTHER; note = 2'-O-methyl modified nucleotide
  modified_base 77: mod_base = OTHER; note = 2'-O-methyl modified nucleotide
  modified_base 78: mod_base = OTHER; note = 2'-O-methyl modified nucleotide
  modified_base 79: mod_base = OTHER; note = 2'-O-methyl modified nucleotide
  modified_base 80: mod_base = OTHER; note = 2'-O-methyl modified nucleotide
  modified_base 81: mod_base = OTHER; note = 2'-O-methyl modified nucleotide
  modified_base 82: mod_base = OTHER; note = 2'-O-methyl modified nucleotide
  modified_base 83: mod_base = OTHER; note = 2'-O-methyl modified nucleotide
  modified_base 84: mod_base = OTHER; note = 2'-O-methyl modified nucleotide
  modified_base 85: mod_base = OTHER; note = 2'-O-methyl modified nucleotide
  modified_base 86: mod_base = OTHER; note = 2'-O-methyl modified nucleotide
  modified_base 87: mod_base = OTHER; note = 2'-O-methyl modified nucleotide
  modified_base 88: mod_base = OTHER; note = 2'-O-methyl modified nucleotide
  modified_base 89: mod_base = OTHER; note = 2'-O-methyl modified nucleotide
  modified_base 90: mod_base = OTHER; note = 2'-O-methyl modified nucleotide
  modified_base 91: mod_base = OTHER; note = 2'-O-methyl modified nucleotide
  modified_base 92: mod_base = OTHER; note = 2'-O-methyl modified nucleotide
  modified_base 93: mod_base = OTHER; note = 2'-O-methyl modified nucleotide
  modified_base 94: mod_base = OTHER; note = 2'-O-methyl modified nucleotide
  modified_base 95: mod_base = OTHER; note = 2'-O-methyl modified nucleotide
  modified_base 96: mod_base = OTHER; note = 2'-O-methyl modified nucleotide
  modified_base 118: mod_base = OTHER; note = Nucleotide with phosphorothioate linkage
  modified_base 119: mod_base = OTHER; note = 2'-O-methyl modified nucleotide with phosphorothioate linkage
  modified_base 120: mod_base = OTHER; note = 2'-O-methyl modified nucleotide with phosphorothioate linkage
  modified_base 121: mod_base = OTHER; note = 2'-O-methyl modified nucleotide
gagtagcgcgagcacagctagttttagagctagaaatagcaagttaaaataaggctagtccgttatcaacttgaaaaagtggcaccgagtcggtgctccgtggccttagtgatctgtgctc

SEQ ID NO: 17715 - RNA, 128 nt, synthetic construct
  source 1..128: mol_type = other RNA
  modified_base 1: mod_base = OTHER; note = 2'-O-methyl modified nucleotide with phosphorothioate linkage
  modified_base 2: mod_base = OTHER; note = 2'-O-methyl modified nucleotide with phosphorothioate linkage
  modified_base 3: mod_base = OTHER; note = 2'-O-methyl modified nucleotide with phosphorothioate linkage
  modified_base 29: mod_base = OTHER; note = 2'-O-methyl modified nucleotide
  modified_base 30: mod_base = OTHER; note = 2'-O-methyl modified nucleotide
  modified_base 31: mod_base = OTHER; note = 2'-O-methyl modified nucleotide
  modified_base 32: mod_base = OTHER; note = 2'-O-methyl modified nucleotide
  modified_base 33: mod_base = OTHER; note = 2'-O-methyl modified nucleotide
  modified_base 34: mod_base = OTHER; note = 2'-O-methyl modified nucleotide
  modified_base 35: mod_base = OTHER; note = 2'-O-methyl modified nucleotide
  modified_base 36: mod_base = OTHER; note = 2'-O-methyl modified nucleotide
  modified_base 37: mod_base = OTHER; note = 2'-O-methyl modified nucleotide
  modified_base 38: mod_base = OTHER; note = 2'-O-methyl modified nucleotide
  modified_base 39: mod_base = OTHER; note = 2'-O-methyl modified nucleotide
  modified_base 40: mod_base = OTHER; note = 2'-O-methyl modified nucleotide
  modified_base 69: mod_base = OTHER; note = 2'-O-methyl modified nucleotide
  modified_base 70: mod_base = OTHER; note = 2'-O-methyl modified nucleotide
  modified_base 71: mod_base = OTHER; note = 2'-O-methyl modified nucleotide
  modified_base 72: mod_base = OTHER; note = 2'-O-methyl modified nucleotide
  modified_base 73: mod_base = OTHER; note = 2'-O-methyl modified nucleotide
  modified_base 74: mod_base = OTHER; note = 2'-O-methyl modified nucleotide
  modified_base 75: mod_base = OTHER; note = 2'-O-methyl modified nucleotide
  modified_base 76: mod_base = OTHER; note = 2'-O-methyl modified nucleotide
  modified_base 77: mod_base = OTHER; note = 2'-O-methyl modified nucleotide
  modified_base 78: mod_base = OTHER; note = 2'-O-methyl modified nucleotide
  modified_base 79: mod_base = OTHER; note = 2'-O-methyl modified nucleotide
  modified_base 80: mod_base = OTHER; note = 2'-O-methyl modified nucleotide
  modified_base 81: mod_base = OTHER; note = 2'-O-methyl modified nucleotide
  modified_base 82: mod_base = OTHER; note = 2'-O-methyl modified nucleotide
  modified_base 83: mod_base = OTHER; note = 2'-O-methyl modified nucleotide
  modified_base 84: mod_base = OTHER; note = 2'-O-methyl modified nucleotide
  modified_base 85: mod_base = OTHER; note = 2'-O-methyl modified nucleotide
  modified_base 86: mod_base = OTHER; note = 2'-O-methyl modified nucleotide
  modified_base 87: mod_base = OTHER; note = 2'-O-methyl modified nucleotide
  modified_base 88: mod_base = OTHER; note = 2'-O-methyl modified nucleotide
  modified_base 89: mod_base = OTHER; note = 2'-O-methyl modified nucleotide
  modified_base 90: mod_base = OTHER; note = 2'-O-methyl modified nucleotide
  modified_base 91: mod_base = OTHER; note = 2'-O-methyl modified nucleotide
  modified_base 92: mod_base = OTHER; note = 2'-O-methyl modified nucleotide
  modified_base 93: mod_base = OTHER; note = 2'-O-methyl modified nucleotide
  modified_base 94: mod_base = OTHER; note = 2'-O-methyl modified nucleotide
  modified_base 95: mod_base = OTHER; note = 2'-O-methyl modified nucleotide
  modified_base 96: mod_base = OTHER; note = 2'-O-methyl modified nucleotide
  modified_base 125: mod_base = OTHER; note = Nucleotide with phosphorothioate linkage
  modified_base 126: mod_base = OTHER; note = 2'-O-methyl modified nucleotide with phosphorothioate linkage
  modified_base 127: mod_base = OTHER; note = 2'-O-methyl modified nucleotide with phosphorothioate linkage
  modified_base 128: mod_base = OTHER; note = 2'-O-methyl modified nucleotide
gagtagcgcgagcacagctagttttagagctagaaatagcaagttaaaataaggctagtccgttatcaacttgaaaaagtggcaccgagtcggtgcgctccgtggccttagtgatctgtgctcgcgct

SEQ ID NO: 17716 - RNA, 127 nt, synthetic construct
  source 1..127: mol_type = other RNA
  modified_base 1: mod_base = OTHER; note = 2'-O-methyl modified nucleotide with phosphorothioate linkage
  modified_base 2: mod_base = OTHER; note = 2'-O-methyl modified nucleotide with phosphorothioate linkage
  modified_base 3: mod_base = OTHER; note = 2'-O-methyl modified nucleotide with phosphorothioate linkage
  modified_base 29: mod_base = OTHER; note = 2'-O-methyl modified nucleotide
  modified_base 30: mod_base = OTHER; note = 2'-O-methyl modified nucleotide
  modified_base 31: mod_base = OTHER; note = 2'-O-methyl modified nucleotide
  modified_base 32: mod_base = OTHER; note = 2'-O-methyl modified nucleotide
  modified_base 33: mod_base = OTHER; note = 2'-O-methyl modified nucleotide
  modified_base 34: mod_base = OTHER; note = 2'-O-methyl modified nucleotide
  modified_base 35: mod_base = OTHER; note = 2'-O-methyl modified nucleotide
  modified_base 36: mod_base = OTHER; note = 2'-O-methyl modified nucleotide
  modified_base 37: mod_base = OTHER; note = 2'-O-methyl modified nucleotide
  modified_base 38: mod_base = OTHER; note = 2'-O-methyl modified nucleotide
  modified_base 39: mod_base = OTHER; note = 2'-O-methyl modified nucleotide
  modified_base 40: mod_base = OTHER; note = 2'-O-methyl modified nucleotide
  modified_base 69: mod_base = OTHER; note = 2'-O-methyl modified nucleotide
  modified_base 70: mod_base = OTHER; note = 2'-O-methyl modified nucleotide
  modified_base 71: mod_base = OTHER; note = 2'-O-methyl modified nucleotide
  modified_base 72: mod_base = OTHER; note = 2'-O-methyl modified nucleotide
  modified_base 73: mod_base = OTHER; note = 2'-O-methyl modified nucleotide
  modified_base 74: mod_base = OTHER; note = 2'-O-methyl modified nucleotide
  modified_base 75: mod_base = OTHER; note = 2'-O-methyl modified nucleotide
  modified_base 76: mod_base = OTHER; note = 2'-O-methyl modified nucleotide
  modified_base 77: mod_base = OTHER; note = 2'-O-methyl modified nucleotide
  modified_base 78: mod_base = OTHER; note = 2'-O-methyl modified nucleotide
  modified_base 79: mod_base = OTHER; note = 2'-O-methyl modified nucleotide
  modified_base 80: mod_base = OTHER; note = 2'-O-methyl modified nucleotide
  modified_base 81: mod_base = OTHER; note = 2'-O-methyl modified nucleotide
  modified_base 82: mod_base = OTHER; note = 2'-O-methyl modified nucleotide
  modified_base 83: mod_base = OTHER; note = 2'-O-methyl modified nucleotide
  modified_base 84: mod_base = OTHER; note = 2'-O-methyl modified nucleotide
  modified_base 85: mod_base = OTHER; note = 2'-O-methyl modified nucleotide
  modified_base 86: mod_base = OTHER; note = 2'-O-methyl modified nucleotide
  modified_base 87: mod_base = OTHER; note = 2'-O-methyl modified nucleotide
  modified_base 88: mod_base = OTHER; note = 2'-O-methyl modified nucleotide
  modified_base 89: mod_base = OTHER; note = 2'-O-methyl modified nucleotide
  modified_base 90: mod_base = OTHER; note = 2'-O-methyl modified nucleotide
  modified_base 91: mod_base = OTHER; note = 2'-O-methyl modified nucleotide
  modified_base 92: mod_base = OTHER; note = 2'-O-methyl modified nucleotide
  modified_base 93: mod_base = OTHER; note = 2'-O-methyl modified nucleotide
  modified_base 94: mod_base = OTHER; note = 2'-O-methyl modified nucleotide
  modified_base 95: mod_base = OTHER; note = 2'-O-methyl modified nucleotide
  modified_base 96: mod_base = OTHER; note = 2'-O-methyl modified nucleotide
  modified_base 124: mod_base = OTHER; note = Nucleotide with phosphorothioate linkage
  modified_base 125: mod_base = OTHER; note = 2'-O-methyl modified nucleotide with phosphorothioate linkage
  modified_base 126: mod_base = OTHER; note = 2'-O-methyl modified nucleotide with phosphorothioate linkage
  modified_base 127: mod_base = OTHER; note = 2'-O-methyl modified nucleotide
gagtagcgcgagcacagctagttttagagctagaaatagcaagttaaaataaggctagtccgttatcaacttgaaaaagtggcaccgagtcggtgcgctccgtggccttagtgatctgtgctcgcgc

SEQ ID NO: 17717 - RNA, 126 nt, synthetic construct
  source 1..126: mol_type = other RNA
  modified_base 1: mod_base = OTHER; note = 2'-O-methyl modified nucleotide with phosphorothioate linkage
  modified_base 2: mod_base = OTHER; note = 2'-O-methyl modified nucleotide with phosphorothioate linkage
  modified_base 3: mod_base = OTHER; note = 2'-O-methyl modified nucleotide with phosphorothioate linkage
  modified_base 29: mod_base = OTHER; note = 2'-O-methyl modified nucleotide
  modified_base 30: mod_base = OTHER; note = 2'-O-methyl modified nucleotide
  modified_base 31: mod_base = OTHER; note = 2'-O-methyl modified nucleotide
  modified_base 32: mod_base = OTHER; note = 2'-O-methyl modified nucleotide
  modified_base 33: mod_base = OTHER; note = 2'-O-methyl modified nucleotide
  modified_base 34: mod_base = OTHER; note = 2'-O-methyl modified nucleotide
  modified_base 35: mod_base = OTHER; note = 2'-O-methyl modified nucleotide
  modified_base 36: mod_base = OTHER; note = 2'-O-methyl modified nucleotide
  modified_base 37: mod_base = OTHER; note = 2'-O-methyl modified nucleotide
  modified_base 38: mod_base = OTHER; note = 2'-O-methyl modified nucleotide
  modified_base 39: mod_base = OTHER; note = 2'-O-methyl modified nucleotide
  modified_base 40: mod_base = OTHER; note = 2'-O-methyl modified nucleotide
  modified_base 69: mod_base = OTHER; note = 2'-O-methyl modified nucleotide
  modified_base 70: mod_base = OTHER; note = 2'-O-methyl modified nucleotide
  modified_base 71: mod_base = OTHER; note = 2'-O-methyl modified nucleotide
  modified_base 72: mod_base = OTHER; note = 2'-O-methyl modified nucleotide
  modified_base 73: mod_base = OTHER; note = 2'-O-methyl modified nucleotide
  modified_base 74: mod_base = OTHER; note = 2'-O-methyl modified nucleotide
  modified_base 75: mod_base = OTHER; note = 2'-O-methyl modified nucleotide
  modified_base 76: mod_base = OTHER; note = 2'-O-methyl modified nucleotide
  modified_base 77: mod_base = OTHER; note = 2'-O-methyl modified nucleotide
  modified_base 78: mod_base = OTHER; note = 2'-O-methyl modified nucleotide
  modified_base 79: mod_base = OTHER; note = 2'-O-methyl modified nucleotide
  modified_base 80: mod_base = OTHER; note = 2'-O-methyl modified nucleotide
  modified_base 81: mod_base = OTHER; note = 2'-O-methyl modified nucleotide
  modified_base 82: mod_base = OTHER; note = 2'-O-methyl modified nucleotide
  modified_base 83: mod_base = OTHER; note = 2'-O-methyl modified nucleotide
  modified_base 84: mod_base = OTHER; note = 2'-O-methyl modified nucleotide
  modified_base 85: mod_base = OTHER; note = 2'-O-methyl modified nucleotide
  modified_base 86: mod_base = OTHER; note = 2'-O-methyl modified nucleotide
  modified_base 87: mod_base = OTHER; note = 2'-O-methyl modified nucleotide
  modified_base 88: mod_base = OTHER; note = 2'-O-methyl modified nucleotide
  modified_base 89: mod_base = OTHER; note = 2'-O-methyl modified nucleotide
  modified_base 90: mod_base = OTHER; note = 2'-O-methyl modified nucleotide
  modified_base 91: mod_base = OTHER; note = 2'-O-methyl modified nucleotide
  modified_base 92: mod_base = OTHER; note = 2'-O-methyl modified nucleotide
  modified_base 93: mod_base = OTHER; note = 2'-O-methyl modified nucleotide
  modified_base 94: mod_base = OTHER; note = 2'-O-methyl modified nucleotide
  modified_base 95: mod_base = OTHER; note = 2'-O-methyl modified nucleotide
  modified_base 96: mod_base = OTHER; note = 2'-O-methyl modified nucleotide
  modified_base 123: mod_base = OTHER; note = Nucleotide with phosphorothioate linkage
  modified_base 124: mod_base = OTHER; note = 2'-O-methyl modified nucleotide with phosphorothioate linkage
  modified_base 125: mod_base = OTHER; note = 2'-O-methyl modified nucleotide with phosphorothioate linkage
  modified_base 126: mod_base = OTHER; note = 2'-O-methyl modified nucleotide
gagtagcgcgagcacagctagttttagagctagaaatagcaagttaaaataaggctagtccgttatcaacttgaaaaagtggcaccgagtcggtgcgctccgtggccttagtgatctgtgctcgcg

SEQ ID NO: 17718 - RNA, 125 nt, synthetic construct
  source 1..125: mol_type = other RNA
  modified_base 1: mod_base = OTHER; note = 2'-O-methyl modified nucleotide with phosphorothioate linkage
  modified_base 2: mod_base = OTHER; note = 2'-O-methyl modified nucleotide with phosphorothioate linkage
  modified_base 3: mod_base = OTHER; note = 2'-O-methyl modified nucleotide with phosphorothioate linkage
  modified_base 29: mod_base = OTHER; note = 2'-O-methyl modified nucleotide
  modified_base 30: mod_base = OTHER; note = 2'-O-methyl modified nucleotide
  modified_base 31: mod_base = OTHER; note = 2'-O-methyl modified nucleotide
  modified_base 32: mod_base = OTHER; note = 2'-O-methyl modified nucleotide
  modified_base 33: mod_base = OTHER; note = 2'-O-methyl modified nucleotide
  modified_base 34: mod_base = OTHER; note = 2'-O-methyl modified nucleotide
  modified_base 35: mod_base = OTHER; note = 2'-O-methyl modified nucleotide
  modified_base 36: mod_base = OTHER; note = 2'-O-methyl modified nucleotide
  modified_base 37: mod_base = OTHER; note = 2'-O-methyl modified nucleotide
  modified_base 38: mod_base = OTHER; note = 2'-O-methyl modified nucleotide
  modified_base 39: mod_base = OTHER; note = 2'-O-methyl modified nucleotide
  modified_base 40: mod_base = OTHER; note = 2'-O-methyl modified nucleotide
  modified_base 69: mod_base = OTHER; note = 2'-O-methyl modified nucleotide
  modified_base 70: mod_base = OTHER; note = 2'-O-methyl modified nucleotide
  modified_base 71: mod_base = OTHER; note = 2'-O-methyl modified nucleotide
  modified_base 72: mod_base = OTHER; note = 2'-O-methyl modified nucleotide
  modified_base 73: mod_base = OTHER; note = 2'-O-methyl modified nucleotide
  modified_base 74: mod_base = OTHER; note = 2'-O-methyl modified nucleotide
  modified_base 75: mod_base = OTHER; note = 2'-O-methyl modified nucleotide
  modified_base 76: mod_base = OTHER; note = 2'-O-methyl modified nucleotide
  modified_base 77: mod_base = OTHER; note = 2'-O-methyl modified nucleotide
  modified_base 78: mod_base = OTHER; note = 2'-O-methyl modified nucleotide
  modified_base 79: mod_base = OTHER; note = 2'-O-methyl modified nucleotide
  modified_base 80: mod_base = OTHER; note = 2'-O-methyl modified nucleotide
  modified_base 81: mod_base = OTHER; note = 2'-O-methyl modified nucleotide
  modified_base 82: mod_base = OTHER; note = 2'-O-methyl modified nucleotide
  modified_base 83: mod_base = OTHER; note = 2'-O-methyl modified nucleotide
  modified_base 84: mod_base = OTHER; note = 2'-O-methyl modified nucleotide
  modified_base 85: mod_base = OTHER; note = 2'-O-methyl modified nucleotide
  modified_base 86: mod_base = OTHER; note = 2'-O-methyl modified nucleotide
  modified_base 87: mod_base = OTHER; note = 2'-O-methyl modified nucleotide
  modified_base 88: mod_base = OTHER; note = 2'-O-methyl modified nucleotide
  modified_base 89: mod_base = OTHER; note = 2'-O-methyl modified nucleotide
  modified_base 90: mod_base = OTHER; note = 2'-O-methyl modified nucleotide
  modified_base 91: mod_base = OTHER; note = 2'-O-methyl modified nucleotide
  modified_base 92: mod_base = OTHER; note = 2'-O-methyl modified nucleotide
  modified_base 93: mod_base = OTHER; note = 2'-O-methyl modified nucleotide
  modified_base 94: mod_base = OTHER; note = 2'-O-methyl modified nucleotide
  modified_base 95: mod_base = OTHER; note = 2'-O-methyl modified nucleotide
  modified_base 96: mod_base = OTHER; note = 2'-O-methyl modified nucleotide
  modified_base 122: mod_base = OTHER; note = Nucleotide with phosphorothioate linkage
  modified_base 123: mod_base = OTHER; note = 2'-O-methyl modified nucleotide with phosphorothioate linkage
  modified_base 124: mod_base = OTHER; note = 2'-O-methyl modified nucleotide with phosphorothioate linkage
  modified_base 125: mod_base = OTHER; note = 2'-O-methyl modified nucleotide
gagtagcgcgagcacagctagttttagagctagaaatagcaagttaaaataaggctagtccgttatcaacttgaaaaagtggcaccgagtcggtgcgctccgtggccttagtgatctgtgctcgc

SEQ ID NO: 17719 - RNA, 124 nt, synthetic construct
  source 1..124: mol_type = other RNA
  modified_base 1: mod_base = OTHER; note = 2'-O-methyl modified nucleotide with phosphorothioate linkage
  modified_base 2: mod_base = OTHER; note = 2'-O-methyl modified nucleotide with phosphorothioate linkage
  modified_base 3: mod_base = OTHER; note = 2'-O-methyl modified nucleotide with phosphorothioate linkage
  modified_base 29: mod_base = OTHER; note = 2'-O-methyl modified nucleotide
  modified_base 30: mod_base = OTHER; note = 2'-O-methyl modified nucleotide
  modified_base 31: mod_base = OTHER; note = 2'-O-methyl modified nucleotide
  modified_base 32: mod_base = OTHER; note = 2'-O-methyl modified nucleotide
  modified_base 33: mod_base = OTHER; note = 2'-O-methyl modified nucleotide
  modified_base 34: mod_base = OTHER; note = 2'-O-methyl modified nucleotide
  modified_base 35: mod_base = OTHER; note = 2'-O-methyl modified nucleotide
  modified_base 36: mod_base = OTHER; note = 2'-O-methyl modified nucleotide
  modified_base 37: mod_base = OTHER; note = 2'-O-methyl modified nucleotide
  modified_base 38: mod_base = OTHER; note = 2'-O-methyl modified nucleotide
  modified_base 39: mod_base = OTHER; note = 2'-O-methyl modified nucleotide
  modified_base 40: mod_base = OTHER; note = 2'-O-methyl modified nucleotide
  modified_base 69: mod_base = OTHER; note = 2'-O-methyl modified nucleotide
  modified_base 70: mod_base = OTHER; note = 2'-O-methyl modified nucleotide
  modified_base 71: mod_base = OTHER; note = 2'-O-methyl modified nucleotide
  modified_base 72: mod_base = OTHER; note = 2'-O-methyl modified nucleotide
  modified_base 73: mod_base = OTHER; note = 2'-O-methyl modified nucleotide
  modified_base 74: mod_base = OTHER; note = 2'-O-methyl modified nucleotide
  modified_base 75: mod_base = OTHER; note = 2'-O-methyl modified nucleotide
  modified_base 76: mod_base = OTHER; note = 2'-O-methyl modified nucleotide
  modified_base 77: mod_base = OTHER; note = 2'-O-methyl modified nucleotide
  modified_base 78: mod_base = OTHER; note = 2'-O-methyl modified nucleotide
  modified_base 79: mod_base = OTHER; note = 2'-O-methyl modified nucleotide
  modified_base 80: mod_base = OTHER; note = 2'-O-methyl modified nucleotide
  modified_base 81: mod_base = OTHER; note = 2'-O-methyl modified nucleotide
  modified_base 82: mod_base = OTHER; note = 2'-O-methyl modified nucleotide
  modified_base 83: mod_base = OTHER; note = 2'-O-methyl modified nucleotide
  modified_base 84: mod_base = OTHER; note = 2'-O-methyl modified nucleotide
  modified_base 85: mod_base = OTHER; note = 2'-O-methyl modified nucleotide
  modified_base 86: mod_base = OTHER; note = 2'-O-methyl modified nucleotide
  modified_base 87: mod_base = OTHER; note = 2'-O-methyl modified nucleotide
  modified_base 88: mod_base = OTHER; note = 2'-O-methyl modified nucleotide
  modified_base 89: mod_base = OTHER; note = 2'-O-methyl modified nucleotide
  modified_base 90: mod_base = OTHER; note = 2'-O-methyl modified nucleotide
  modified_base 91: mod_base = OTHER; note = 2'-O-methyl modified nucleotide
  modified_base 92: mod_base = OTHER; note = 2'-O-methyl modified nucleotide
  modified_base 93: mod_base = OTHER; note = 2'-O-methyl modified nucleotide
  modified_base 94: mod_base = OTHER; note = 2'-O-methyl modified nucleotide
  modified_base 95: mod_base = OTHER; note = 2'-O-methyl modified nucleotide
  modified_base 96: mod_base = OTHER; note = 2'-O-methyl modified nucleotide
  modified_base 121: mod_base = OTHER; note = Nucleotide with phosphorothioate linkage
  modified_base 122: mod_base = OTHER; note = 2'-O-methyl modified nucleotide with phosphorothioate linkage
  modified_base 123: mod_base = OTHER; note = 2'-O-methyl modified nucleotide with phosphorothioate linkage
  modified_base 124: mod_base = OTHER; note = 2'-O-methyl modified nucleotide
gagtagcgcgagcacagctagttttagagctagaaatagcaagttaaaataaggctagtccgttatcaacttgaaaaagtggcaccgagtcggtgcgctccgtggccttagtgatctgtgctcg

SEQ ID NO: 17720 - RNA, 123 nt, synthetic construct
  source 1..123: mol_type = other RNA
  modified_base 1: mod_base = OTHER; note = 2'-O-methyl modified nucleotide with phosphorothioate linkage
  modified_base 2: mod_base = OTHER; note = 2'-O-methyl modified nucleotide with phosphorothioate linkage
  modified_base 3: mod_base = OTHER; note = 2'-O-methyl modified nucleotide with phosphorothioate linkage
  modified_base 29: mod_base = OTHER; note = 2'-O-methyl modified nucleotide
  modified_base 30: mod_base = OTHER; note = 2'-O-methyl modified nucleotide
  modified_base 31: mod_base = OTHER; note = 2'-O-methyl modified nucleotide
  modified_base 32: mod_base = OTHER; note = 2'-O-methyl modified nucleotide
  modified_base 33: mod_base = OTHER; note = 2'-O-methyl modified nucleotide
  modified_base 34: mod_base = OTHER; note = 2'-O-methyl modified nucleotide
  modified_base 35: mod_base = OTHER; note = 2'-O-methyl modified nucleotide
  modified_base 36: mod_base = OTHER; note = 2'-O-methyl modified nucleotide
  modified_base 37: mod_base = OTHER; note = 2'-O-methyl modified nucleotide
  modified_base 38: mod_base = OTHER; note = 2'-O-methyl modified nucleotide
  modified_base 39: mod_base = OTHER; note = 2'-O-methyl modified nucleotide
  modified_base 40: mod_base = OTHER; note = 2'-O-methyl modified nucleotide
  modified_base 69: mod_base = OTHER; note = 2'-O-methyl modified nucleotide
  modified_base 70: mod_base = OTHER; note = 2'-O-methyl modified nucleotide
  modified_base 71: mod_base = OTHER; note = 2'-O-methyl modified nucleotide
  modified_base 72: mod_base = OTHER; note = 2'-O-methyl modified nucleotide
  modified_base 73: mod_base = OTHER; note = 2'-O-methyl modified nucleotide
  modified_base 74: mod_base = OTHER; note = 2'-O-methyl modified nucleotide
  modified_base 75: mod_base = OTHER; note = 2'-O-methyl modified nucleotide
  modified_base 76: mod_base = OTHER; note = 2'-O-methyl modified nucleotide
  modified_base 77: mod_base = OTHER; note = 2'-O-methyl modified nucleotide
  modified_base 78: mod_base = OTHER; note = 2'-O-methyl modified nucleotide
  modified_base 79: mod_base = OTHER; note = 2'-O-methyl modified nucleotide
  modified_base 80: mod_base = OTHER; note = 2'-O-methyl modified nucleotide
  modified_base 81: mod_base = OTHER; note = 2'-O-methyl modified nucleotide
  modified_base 82: mod_base = OTHER; note = 2'-O-methyl modified nucleotide
  modified_base 83: mod_base = OTHER; note = 2'-O-methyl modified nucleotide
  modified_base 84: mod_base = OTHER; note = 2'-O-methyl modified nucleotide
  modified_base 85: mod_base = OTHER; note = 2'-O-methyl modified nucleotide
  modified_base 86: mod_base = OTHER; note = 2'-O-methyl modified nucleotide
  modified_base 87: mod_base = OTHER; note = 2'-O-methyl modified nucleotide
  modified_base 88: mod_base = OTHER; note = 2'-O-methyl modified nucleotide
  modified_base 89: mod_base = OTHER; note = 2'-O-methyl modified nucleotide
  modified_base 90: mod_base = OTHER; note = 2'-O-methyl modified nucleotide
  modified_base 91: mod_base = OTHER; note = 2'-O-methyl modified nucleotide
  modified_base 92: mod_base = OTHER; note = 2'-O-methyl modified nucleotide
  modified_base 93: mod_base = OTHER; note = 2'-O-methyl modified nucleotide
  modified_base 94: mod_base = OTHER; note = 2'-O-methyl modified nucleotide
  modified_base 95: mod_base = OTHER; note = 2'-O-methyl modified nucleotide
  modified_base 96: mod_base = OTHER; note = 2'-O-methyl modified nucleotide
  modified_base 120: mod_base = OTHER; note = Nucleotide with phosphorothioate linkage
  modified_base 121: mod_base = OTHER; note = 2'-O-methyl modified nucleotide with phosphorothioate linkage
  modified_base 122: mod_base = OTHER; note = 2'-O-methyl modified nucleotide with phosphorothioate linkage
  modified_base 123: mod_base = OTHER; note = 2'-O-methyl modified nucleotide
gagtagcgcgagcacagctagttttagagctagaaatagcaagttaaaataaggctagtccgttatcaacttgaaaaagtggcaccgagtcggtgcgctccgtggccttagtgatctgtgctc

SEQ ID NO: 17721 - RNA, 130 nt, synthetic construct
  source 1..130: mol_type = other RNA
  modified_base 1: mod_base = OTHER; note = 2'-O-methyl modified nucleotide with phosphorothioate linkage
  modified_base 2: mod_base = OTHER; note = 2'-O-methyl modified nucleotide with phosphorothioate linkage
  modified_base 3: mod_base = OTHER; note = 2'-O-methyl modified nucleotide with phosphorothioate linkage
  modified_base 29: mod_base = OTHER; note = 2'-O-methyl modified nucleotide
  modified_base 30: mod_base = OTHER; note = 2'-O-methyl modified nucleotide
  modified_base 31: mod_base = OTHER; note = 2'-O-methyl modified nucleotide
  modified_base 32: mod_base = OTHER; note = 2'-O-methyl modified nucleotide
  modified_base 33: mod_base = OTHER; note = 2'-O-methyl modified nucleotide
  modified_base 34: mod_base = OTHER; note = 2'-O-methyl modified nucleotide
  modified_base 35: mod_base = OTHER; note = 2'-O-methyl modified nucleotide
  modified_base 36: mod_base = OTHER; note = 2'-O-methyl modified nucleotide
  modified_base 37: mod_base = OTHER; note = 2'-O-methyl modified nucleotide
  modified_base 38: mod_base = OTHER; note = 2'-O-methyl modified nucleotide
  modified_base 39: mod_base = OTHER; note = 2'-O-methyl modified nucleotide
  modified_base 40: mod_base = OTHER; note = 2'-O-methyl modified nucleotide
  modified_base 69: mod_base = OTHER; note = 2'-O-methyl modified nucleotide
  modified_base 70: mod_base = OTHER; note = 2'-O-methyl modified nucleotide
  modified_base 71: mod_base = OTHER; note = 2'-O-methyl modified nucleotide
  modified_base 72: mod_base = OTHER; note = 2'-O-methyl modified nucleotide
  modified_base 73: mod_base = OTHER; note = 2'-O-methyl modified nucleotide
  modified_base 74: mod_base = OTHER; note = 2'-O-methyl modified nucleotide
  modified_base 75: mod_base = OTHER; note = 2'-O-methyl modified nucleotide
  modified_base 76: mod_base = OTHER; note = 2'-O-methyl modified nucleotide
  modified_base 77: mod_base = OTHER; note = 2'-O-methyl modified nucleotide
  modified_base 78: mod_base = OTHER; note = 2'-O-methyl modified nucleotide
  modified_base 79: mod_base = OTHER; note = 2'-O-methyl modified nucleotide
  modified_base 80: mod_base = OTHER; note = 2'-O-methyl modified nucleotide
  modified_base 81: mod_base = OTHER; note = 2'-O-methyl modified nucleotide
  modified_base 82: mod_base = OTHER; note = 2'-O-methyl modified nucleotide
  modified_base 83: mod_base = OTHER; note = 2'-O-methyl modified nucleotide
  modified_base 84: mod_base = OTHER; note = 2'-O-methyl modified nucleotide
  modified_base 85: mod_base = OTHER; note = 2'-O-methyl modified nucleotide
  modified_base 86: mod_base = OTHER; note = 2'-O-methyl modified nucleotide
  modified_base 87: mod_base = OTHER; note = 2'-O-methyl modified nucleotide
  modified_base 88: mod_base = OTHER; note = 2'-O-methyl modified nucleotide
  modified_base 89: mod_base = OTHER; note = 2'-O-methyl modified nucleotide
  modified_base 90: mod_base = OTHER; note = 2'-O-methyl modified nucleotide
  modified_base 91: mod_base = OTHER; note = 2'-O-methyl modified nucleotide
  modified_base 92: mod_base = OTHER; note = 2'-O-methyl modified nucleotide
  modified_base 93: mod_base = OTHER; note = 2'-O-methyl modified nucleotide
  modified_base 94: mod_base = OTHER; note = 2'-O-methyl modified nucleotide
  modified_base 95: mod_base = OTHER; note = 2'-O-methyl modified nucleotide
  modified_base 96: mod_base = OTHER; note = 2'-O-methyl modified nucleotide
  modified_base 127: mod_base = OTHER; note = Nucleotide with phosphorothioate linkage
  modified_base 128: mod_base = OTHER; note = 2'-O-methyl modified nucleotide with phosphorothioate linkage
  modified_base 129: mod_base = OTHER; note = 2'-O-methyl modified nucleotide with phosphorothioate linkage
  modified_base 130: mod_base = OTHER; note = 2'-O-methyl modified nucleotide
gagtagcgcgagcacagctagttttagagctagaaatagcaagttaaaataaggctagtccgttatcaacttgaaaaagtggcaccgagtcggtgctcgctccgtggccttagtgatctgtgctcgcgct

SEQ ID NO: 17722 - RNA, 129 nt, synthetic construct
  source 1..129: mol_type = other RNA
  modified_base 1: mod_base = OTHER; note = 2'-O-methyl modified nucleotide with phosphorothioate linkage
  modified_base 2: mod_base = OTHER; note = 2'-O-methyl modified nucleotide with phosphorothioate linkage
  modified_base 3: mod_base = OTHER; note = 2'-O-methyl modified nucleotide with phosphorothioate linkage
  modified_base 29: mod_base = OTHER; note = 2'-O-methyl modified nucleotide
  modified_base 30: mod_base = OTHER; note = 2'-O-methyl modified nucleotide
  modified_base 31: mod_base = OTHER; note = 2'-O-methyl modified nucleotide
  modified_base 32: mod_base = OTHER; note = 2'-O-methyl modified nucleotide
  modified_base 33: mod_base = OTHER; note = 2'-O-methyl modified nucleotide
  modified_base 34: mod_base = OTHER; note = 2'-O-methyl modified nucleotide
  modified_base 35: mod_base = OTHER; note = 2'-O-methyl modified nucleotide
  modified_base 36: mod_base = OTHER; note = 2'-O-methyl modified nucleotide
  modified_base 37: mod_base = OTHER; note = 2'-O-methyl modified nucleotide
  modified_base 38: mod_base = OTHER; note = 2'-O-methyl modified nucleotide
  modified_base 39: mod_base = OTHER; note = 2'-O-methyl modified nucleotide
  modified_base 40: mod_base = OTHER; note = 2'-O-methyl modified nucleotide
  modified_base 69: mod_base = OTHER; note = 2'-O-methyl modified nucleotide
  modified_base 70: mod_base = OTHER; note = 2'-O-methyl modified nucleotide
  modified_base 71: mod_base = OTHER; note = 2'-O-methyl modified nucleotide
  modified_base 72: mod_base = OTHER; note = 2'-O-methyl modified nucleotide
  modified_base 73: mod_base = OTHER; note = 2'-O-methyl modified nucleotide
  modified_base 74: mod_base = OTHER; note = 2'-O-methyl modified nucleotide
  modified_base 75: mod_base = OTHER; note = 2'-O-methyl modified nucleotide
  modified_base 76: mod_base = OTHER; note = 2'-O-methyl modified nucleotide
  modified_base 77: mod_base = OTHER; note = 2'-O-methyl modified nucleotide
  modified_base 78: mod_base = OTHER; note = 2'-O-methyl modified nucleotide
  modified_base 79: mod_base = OTHER; note = 2'-O-methyl modified nucleotide
  modified_base 80: mod_base = OTHER; note = 2'-O-methyl modified nucleotide
  modified_base 81: mod_base = OTHER; note = 2'-O-methyl modified nucleotide
  modified_base 82: mod_base = OTHER; note = 2'-O-methyl modified nucleotide
  modified_base 83: mod_base = OTHER; note = 2'-O-methyl modified nucleotide
  modified_base 84: mod_base = OTHER; note = 2'-O-methyl modified nucleotide
  modified_base 85: mod_base = OTHER; note = 2'-O-methyl modified nucleotide
  modified_base 86: mod_base = OTHER; note = 2'-O-methyl modified nucleotide
  modified_base 87: mod_base = OTHER; note = 2'-O-methyl modified nucleotide
  modified_base 88: mod_base = OTHER; note = 2'-O-methyl modified nucleotide
  modified_base 89: mod_base = OTHER; note = 2'-O-methyl modified nucleotide
  modified_base 90: mod_base = OTHER; note = 2'-O-methyl modified nucleotide
  modified_base 91: mod_base = OTHER; note = 2'-O-methyl modified nucleotide
  modified_base 92: mod_base = OTHER; note = 2'-O-methyl modified nucleotide
  modified_base 93: mod_base = OTHER; note = 2'-O-methyl modified nucleotide
  modified_base 94: mod_base = OTHER; note = 2'-O-methyl modified nucleotide
  modified_base 95: mod_base = OTHER; note = 2'-O-methyl modified nucleotide
  modified_base 96: mod_base = OTHER; note = 2'-O-methyl modified nucleotide
  modified_base 126: mod_base = OTHER; note = Nucleotide with phosphorothioate linkage
  modified_base 127: mod_base = OTHER; note = 2'-O-methyl modified nucleotide with phosphorothioate linkage
  modified_base 128: mod_base = OTHER; note = 2'-O-methyl modified nucleotide with phosphorothioate linkage
  modified_base 129: mod_base = OTHER; note = 2'-O-methyl modified nucleotide
gagtagcgcgagcacagctagttttagagctagaaatagcaagttaaaataaggctagtccgttatcaacttgaaaaagtggcaccgagtcggtgctcgctccgtggccttagtgatctgtgctcgcgc

SEQ ID NO: 17723 - RNA, 128 nt, synthetic construct
  source 1..128: mol_type = other RNA
  modified_base 1: mod_base = OTHER; note = 2'-O-methyl modified nucleotide with phosphorothioate linkage
  modified_base 2: mod_base = OTHER; note = 2'-O-methyl modified nucleotide with phosphorothioate linkage
  modified_base 3: mod_base = OTHER; note = 2'-O-methyl modified nucleotide with phosphorothioate linkage
  modified_base 29: mod_base = OTHER; note = 2'-O-methyl modified nucleotide
  modified_base 30: mod_base = OTHER; note = 2'-O-methyl modified nucleotide
  modified_base 31: mod_base = OTHER; note = 2'-O-methyl modified nucleotide
  modified_base 32: mod_base = OTHER; note = 2'-O-methyl modified nucleotide
  modified_base 33: mod_base = OTHER; note = 2'-O-methyl modified nucleotide
  modified_base 34: mod_base = OTHER; note = 2'-O-methyl modified nucleotide
  modified_base 35: mod_base = OTHER; note = 2'-O-methyl modified nucleotide
  modified_base 36: mod_base = OTHER; note = 2'-O-methyl modified nucleotide
  modified_base 37: mod_base = OTHER; note = 2'-O-methyl modified nucleotide
  modified_base 38: mod_base = OTHER; note = 2'-O-methyl modified nucleotide
  modified_base 39: mod_base = OTHER; note = 2'-O-methyl modified nucleotide
  modified_base 40: mod_base = OTHER; note = 2'-O-methyl modified nucleotide
  modified_base 69: mod_base = OTHER; note = 2'-O-methyl modified nucleotide
  modified_base 70: mod_base = OTHER; note = 2'-O-methyl modified nucleotide
  modified_base 71: mod_base = OTHER; note = 2'-O-methyl modified nucleotide
  modified_base 72: mod_base = OTHER; note = 2'-O-methyl modified nucleotide
  modified_base 73: mod_base = OTHER; note = 2'-O-methyl modified nucleotide
  modified_base 74: mod_base = OTHER; note = 2'-O-methyl modified nucleotide
  modified_base 75: mod_base = OTHER; note = 2'-O-methyl modified nucleotide
  modified_base 76: mod_base = OTHER; note = 2'-O-methyl modified nucleotide
  modified_base 77: mod_base = OTHER; note = 2'-O-methyl modified nucleotide
  modified_base 78: mod_base = OTHER; note = 2'-O-methyl modified nucleotide
  modified_base 79: mod_base = OTHER; note = 2'-O-methyl modified nucleotide
  modified_base 80: mod_base = OTHER; note = 2'-O-methyl modified nucleotide
  modified_base 81: mod_base = OTHER; note = 2'-O-methyl modified nucleotide
  modified_base 82: mod_base = OTHER; note = 2'-O-methyl modified nucleotide
  modified_base 83: mod_base = OTHER; note = 2'-O-methyl modified nucleotide
  modified_base 84: mod_base = OTHER; note = 2'-O-methyl modified nucleotide
  modified_base 85: mod_base = OTHER; note = 2'-O-methyl modified nucleotide
  modified_base 86: mod_base = OTHER; note = 2'-O-methyl modified nucleotide
  modified_base 87: mod_base = OTHER; note = 2'-O-methyl modified nucleotide
  modified_base 88: mod_base = OTHER; note = 2'-O-methyl modified nucleotide
  modified_base 89: mod_base = OTHER; note = 2'-O-methyl modified nucleotide
  modified_base 90: mod_base = OTHER; note = 2'-O-methyl modified nucleotide
  modified_base 91: mod_base = OTHER; note = 2'-O-methyl modified nucleotide
  modified_base 92: mod_base = OTHER; note = 2'-O-methyl modified nucleotide
  modified_base 93: mod_base = OTHER; note = 2'-O-methyl modified nucleotide
  modified_base 94: mod_base = OTHER; note = 2'-O-methyl modified nucleotide
  modified_base 95: mod_base = OTHER; note = 2'-O-methyl modified nucleotide
  modified_base 96: mod_base = OTHER; note = 2'-O-methyl modified nucleotide
  modified_base 125: mod_base = OTHER; note = Nucleotide with phosphorothioate linkage
  modified_base 126: mod_base = OTHER; note = 2'-O-methyl modified nucleotide with phosphorothioate linkage
  modified_base 127: mod_base = OTHER; note = 2'-O-methyl modified nucleotide with phosphorothioate linkage
  modified_base 128: mod_base = OTHER; note = 2'-O-methyl modified nucleotide
gagtagcgcgagcacagctagttttagagctagaaatagcaagttaaaataaggctagtccgttatcaacttgaaaaagtggcaccgagtcggtgctcgctccgtggccttagtgatctgtgctcgcg

SEQ ID NO: 17724 - RNA, 127 nt, synthetic construct
  source 1..127: mol_type = other RNA
  modified_base 1: mod_base = OTHER; note = 2'-O-methyl modified nucleotide with phosphorothioate linkage
  modified_base 2: mod_base = OTHER; note = 2'-O-methyl modified nucleotide with phosphorothioate linkage
  modified_base 3: mod_base = OTHER; note = 2'-O-methyl modified nucleotide with phosphorothioate linkage
  modified_base 29: mod_base = OTHER; note = 2'-O-methyl modified nucleotide
  modified_base 30: mod_base = OTHER; note = 2'-O-methyl modified nucleotide
  modified_base 31: mod_base = OTHER; note = 2'-O-methyl modified nucleotide
  modified_base 32: mod_base = OTHER; note = 2'-O-methyl modified nucleotide
  modified_base 33: mod_base = OTHER; note = 2'-O-methyl modified nucleotide
  modified_base 34: mod_base = OTHER; note = 2'-O-methyl modified nucleotide
  modified_base 35: mod_base = OTHER; note = 2'-O-methyl modified nucleotide
  modified_base 36: mod_base = OTHER; note = 2'-O-methyl modified nucleotide
  modified_base 37: mod_base = OTHER; note = 2'-O-methyl modified nucleotide
  modified_base 38: mod_base = OTHER; note = 2'-O-methyl modified nucleotide
  modified_base 39: mod_base = OTHER; note = 2'-O-methyl modified nucleotide
  modified_base 40: mod_base = OTHER; note = 2'-O-methyl modified nucleotide
  modified_base 69: mod_base = OTHER; note = 2'-O-methyl modified nucleotide
  modified_base 70: mod_base = OTHER; note = 2'-O-methyl modified nucleotide
  modified_base 71: mod_base = OTHER; note = 2'-O-methyl modified nucleotide
  modified_base 72: mod_base = OTHER; note = 2'-O-methyl modified nucleotide
  modified_base 73: mod_base = OTHER; note = 2'-O-methyl modified nucleotide
  modified_base 74: mod_base = OTHER; note = 2'-O-methyl modified nucleotide
  modified_base 75: mod_base = OTHER; note = 2'-O-methyl modified nucleotide
  modified_base 76: mod_base = OTHER; note = 2'-O-methyl modified nucleotide
  modified_base 77: mod_base = OTHER; note = 2'-O-methyl modified nucleotide
  modified_base 78: mod_base = OTHER; note = 2'-O-methyl modified nucleotide
  modified_base 79: mod_base = OTHER; note = 2'-O-methyl modified nucleotide
  modified_base 80: mod_base = OTHER; note = 2'-O-methyl modified nucleotide
  modified_base 81: mod_base = OTHER; note = 2'-O-methyl modified nucleotide
  modified_base 82: mod_base = OTHER; note = 2'-O-methyl modified nucleotide
  modified_base 83: mod_base = OTHER; note = 2'-O-methyl modified nucleotide
  modified_base 84: mod_base = OTHER; note = 2'-O-methyl modified nucleotide
  modified_base 85: mod_base = OTHER; note = 2'-O-methyl modified nucleotide
  modified_base 86: mod_base = OTHER; note = 2'-O-methyl modified nucleotide
  modified_base 87: mod_base = OTHER; note = 2'-O-methyl modified nucleotide
  modified_base 88: mod_base = OTHER; note = 2'-O-methyl modified nucleotide
  modified_base 89: mod_base = OTHER; note = 2'-O-methyl modified nucleotide
  modified_base 90: mod_base = OTHER; note = 2'-O-methyl modified nucleotide
  modified_base 91: mod_base = OTHER; note = 2'-O-methyl modified nucleotide
  modified_base 92: mod_base = OTHER; note = 2'-O-methyl modified nucleotide
  modified_base 93: mod_base = OTHER; note = 2'-O-methyl modified nucleotide
  modified_base 94: mod_base = OTHER; note = 2'-O-methyl modified nucleotide
  modified_base 95: mod_base = OTHER; note = 2'-O-methyl modified nucleotide
  modified_base 96: mod_base = OTHER; note = 2'-O-methyl modified nucleotide
  modified_base 124: mod_base = OTHER; note = Nucleotide with phosphorothioate linkage
  modified_base 125: mod_base = OTHER; note = 2'-O-methyl modified nucleotide with phosphorothioate linkage
  modified_base 126: mod_base = OTHER; note = 2'-O-methyl modified nucleotide with phosphorothioate linkage
  modified_base 127: mod_base = OTHER; note = 2'-O-methyl modified nucleotide
gagtagcgcgagcacagctagttttagagctagaaatagcaagttaaaataaggctagtccgttatcaacttgaaaaagtggcaccgagtcggtgctcgctccgtggccttagtgatctgtgctcgc

SEQ ID NO: 17725 - RNA, 126 nt, synthetic construct
  source 1..126: mol_type = other RNA
  modified_base 1: mod_base = OTHER; note = 2'-O-methyl modified nucleotide with phosphorothioate linkage
  modified_base 2: mod_base = OTHER; note = 2'-O-methyl modified nucleotide with phosphorothioate linkage
  modified_base 3: mod_base = OTHER; note = 2'-O-methyl modified nucleotide with phosphorothioate linkage
  modified_base 29: mod_base = OTHER; note = 2'-O-methyl modified nucleotide
  modified_base 30: mod_base = OTHER; note = 2'-O-methyl modified nucleotide
  modified_base 31: mod_base = OTHER; note = 2'-O-methyl modified nucleotide
  modified_base 32: mod_base = OTHER; note = 2'-O-methyl modified nucleotide
  modified_base 33: mod_base = OTHER; note = 2'-O-methyl modified nucleotide
  modified_base 34: mod_base = OTHER; note = 2'-O-methyl modified nucleotide
  modified_base 35: mod_base = OTHER; note = 2'-O-methyl modified nucleotide
  modified_base 36: mod_base = OTHER; note = 2'-O-methyl modified nucleotide
  modified_base 37: mod_base = OTHER; note = 2'-O-methyl modified nucleotide
  modified_base 38: mod_base = OTHER; note = 2'-O-methyl modified nucleotide
  modified_base 39: mod_base = OTHER; note = 2'-O-methyl modified nucleotide
  modified_base 40: mod_base = OTHER; note = 2'-O-methyl modified nucleotide
  modified_base 69: mod_base = OTHER; note = 2'-O-methyl modified nucleotide
  modified_base 70: mod_base = OTHER; note = 2'-O-methyl modified nucleotide
  modified_base 71: mod_base = OTHER; note = 2'-O-methyl modified nucleotide
  modified_base 72: mod_base = OTHER; note = 2'-O-methyl modified nucleotide
  modified_base 73: mod_base = OTHER; note = 2'-O-methyl modified nucleotide
  modified_base 74: mod_base = OTHER; note = 2'-O-methyl modified nucleotide
  modified_base 75: mod_base = OTHER; note = 2'-O-methyl modified nucleotide
  modified_base 76: mod_base = OTHER; note = 2'-O-methyl modified nucleotide
  modified_base 77: mod_base = OTHER; note = 2'-O-methyl modified nucleotide
  modified_base 78: mod_base = OTHER; note = 2'-O-methyl modified nucleotide
  modified_base 79: mod_base = OTHER; note = 2'-O-methyl modified nucleotide
  modified_base 80: mod_base = OTHER; note = 2'-O-methyl modified nucleotide
  modified_base 81: mod_base = OTHER; note = 2'-O-methyl modified nucleotide
  modified_base 82: mod_base = OTHER; note = 2'-O-methyl modified nucleotide
  modified_base 83: mod_base = OTHER; note = 2'-O-methyl modified nucleotide
  modified_base 84: mod_base = OTHER; note = 2'-O-methyl modified nucleotide
  modified_base 85: mod_base = OTHER; note = 2'-O-methyl modified nucleotide
  modified_base 86: mod_base = OTHER; note = 2'-O-methyl modified nucleotide
  modified_base 87: mod_base = OTHER; note = 2'-O-methyl modified nucleotide
  modified_base 88: mod_base = OTHER; note = 2'-O-methyl modified nucleotide
  modified_base 89: mod_base = OTHER; note = 2'-O-methyl modified nucleotide
  modified_base 90: mod_base = OTHER; note = 2'-O-methyl modified nucleotide
  modified_base 91: mod_base = OTHER; note = 2'-O-methyl modified nucleotide
  modified_base 92: mod_base = OTHER; note = 2'-O-methyl modified nucleotide
  modified_base 93: mod_base = OTHER; note = 2'-O-methyl modified nucleotide
  modified_base 94: mod_base = OTHER; note = 2'-O-methyl modified nucleotide
  modified_base 95: mod_base = OTHER; note = 2'-O-methyl modified nucleotide
  modified_base 96: mod_base = OTHER; note = 2'-O-methyl modified nucleotide
  modified_base 123: mod_base = OTHER; note = Nucleotide with phosphorothioate linkage
  modified_base 124: mod_base = OTHER; note = 2'-O-methyl modified nucleotide with phosphorothioate linkage
  modified_base 125: mod_base = OTHER; note = 2'-O-methyl modified nucleotide with phosphorothioate linkage
  modified_base 126: mod_base = OTHER; note = 2'-O-methyl modified nucleotide
gagtagcgcgagcacagctagttttagagctagaaatagcaagttaaaataaggctagtccgttatcaacttgaaaaagtggcaccgagtcggtgctcgctccgtggccttagtgatctgtgctcg

SEQ ID NO: 17726 - RNA, 125 nt, synthetic construct
  source 1..125: mol_type = other RNA
  modified_base 1: mod_base = OTHER; note = 2'-O-methyl modified nucleotide with phosphorothioate linkage
  modified_base 2: mod_base = OTHER; note = 2'-O-methyl modified nucleotide with phosphorothioate linkage
  modified_base 3: mod_base = OTHER; note = 2'-O-methyl modified nucleotide with phosphorothioate linkage
  modified_base 29: mod_base = OTHER; note = 2'-O-methyl modified nucleotide
  modified_base 30: mod_base = OTHER; note = 2'-O-methyl modified nucleotide
  modified_base 31: mod_base = OTHER; note = 2'-O-methyl modified nucleotide
  modified_base 32: mod_base = OTHER; note = 2'-O-methyl modified nucleotide
  modified_base 33: mod_base = OTHER; note = 2'-O-methyl modified nucleotide
  modified_base 34: mod_base = OTHER; note = 2'-O-methyl modified nucleotide
  modified_base 35: mod_base = OTHER; note = 2'-O-methyl modified nucleotide
  modified_base 36: mod_base = OTHER; note = 2'-O-methyl modified nucleotide
  modified_base 37: mod_base = OTHER; note = 2'-O-methyl modified nucleotide
  modified_base 38: mod_base = OTHER; note = 2'-O-methyl modified nucleotide
  modified_base 39: mod_base = OTHER; note = 2'-O-methyl modified nucleotide
  modified_base 40: mod_base = OTHER; note = 2'-O-methyl modified nucleotide
  modified_base 69: mod_base = OTHER; note = 2'-O-methyl modified nucleotide
  modified_base 70: mod_base = OTHER; note = 2'-O-methyl modified nucleotide
  modified_base 71: mod_base = OTHER; note = 2'-O-methyl modified nucleotide
  modified_base 72: mod_base = OTHER; note = 2'-O-methyl modified nucleotide
  modified_base 73: mod_base = OTHER; note = 2'-O-methyl modified nucleotide
  modified_base 74: mod_base = OTHER; note = 2'-O-methyl modified nucleotide
  modified_base 75: mod_base = OTHER; note = 2'-O-methyl modified nucleotide
  modified_base 76: mod_base = OTHER; note = 2'-O-methyl modified nucleotide
  modified_base 77: mod_base = OTHER; note = 2'-O-methyl modified nucleotide
  modified_base 78: mod_base = OTHER; note = 2'-O-methyl modified nucleotide
  modified_base 79: mod_base = OTHER; note = 2'-O-methyl modified nucleotide
  modified_base 80: mod_base = OTHER; note = 2'-O-methyl modified nucleotide
  modified_base 81: mod_base = OTHER; note = 2'-O-methyl modified nucleotide
  modified_base 82: mod_base = OTHER; note = 2'-O-methyl modified nucleotide
  modified_base 83: mod_base = OTHER; note = 2'-O-methyl modified nucleotide
  modified_base 84: mod_base = OTHER; note = 2'-O-methyl modified nucleotide
  modified_base 85: mod_base = OTHER; note = 2'-O-methyl modified nucleotide
  modified_base 86: mod_base = OTHER; note = 2'-O-methyl modified nucleotide
  modified_base 87: mod_base = OTHER; note = 2'-O-methyl modified nucleotide
  modified_base 88: mod_base = OTHER; note = 2'-O-methyl modified nucleotide
  modified_base 89: mod_base = OTHER; note = 2'-O-methyl modified nucleotide
  modified_base 90: mod_base = OTHER; note = 2'-O-methyl modified nucleotide
  modified_base 91: mod_base = OTHER; note = 2'-O-methyl modified nucleotide
  modified_base 92: mod_base = OTHER; note = 2'-O-methyl modified nucleotide
  modified_base 93: mod_base = OTHER; note = 2'-O-methyl modified nucleotide
  modified_base 94: mod_base = OTHER; note = 2'-O-methyl modified nucleotide
  modified_base 95: mod_base = OTHER; note = 2'-O-methyl modified nucleotide
  modified_base 96: mod_base = OTHER; note = 2'-O-methyl modified nucleotide
  modified_base 122: mod_base = OTHER; note = Nucleotide with phosphorothioate linkage
  modified_base 123: mod_base = OTHER; note = 2'-O-methyl modified nucleotide with phosphorothioate linkage
  modified_base 124: mod_base = OTHER; note = 2'-O-methyl modified nucleotide with phosphorothioate linkage
  modified_base 125: mod_base = OTHER; note = 2'-O-methyl modified nucleotide
gagtagcgcgagcacagctagttttagagctagaaatagcaagttaaaataaggctagtccgttatcaacttgaaaaagtggcaccgagtcggtgctcgctccgtggccttagtgatctgtgctc

SEQ ID NO: 17727 - RNA, 132 nt, synthetic construct
  source 1..132: mol_type = other RNA
  modified_base 1: mod_base = OTHER; note = 2'-O-methyl modified nucleotide with phosphorothioate linkage
  modified_base 2: mod_base = OTHER; note = 2'-O-methyl modified nucleotide with phosphorothioate linkage
  modified_base 3: mod_base = OTHER; note = 2'-O-methyl modified nucleotide with phosphorothioate linkage
  modified_base 29: mod_base = OTHER; note = 2'-O-methyl modified nucleotide
  modified_base 30: mod_base = OTHER; note = 2'-O-methyl modified nucleotide
  modified_base 31: mod_base = OTHER; note = 2'-O-methyl modified nucleotide
  modified_base 32: mod_base = OTHER; note = 2'-O-methyl modified nucleotide
  modified_base 33: mod_base = OTHER; note = 2'-O-methyl modified nucleotide
  modified_base 34: mod_base = OTHER; note = 2'-O-methyl modified nucleotide
  modified_base 35: mod_base = OTHER; note = 2'-O-methyl modified nucleotide
  modified_base 36: mod_base = OTHER; note = 2'-O-methyl modified nucleotide
  modified_base 37: mod_base = OTHER; note = 2'-O-methyl modified nucleotide
  modified_base 38: mod_base = OTHER; note = 2'-O-methyl modified nucleotide
  modified_base 39: mod_base = OTHER; note = 2'-O-methyl modified nucleotide
  modified_base 40: mod_base = OTHER; note = 2'-O-methyl modified nucleotide
  modified_base 69: mod_base = OTHER; note = 2'-O-methyl modified nucleotide
  modified_base 70: mod_base = OTHER; note = 2'-O-methyl modified nucleotide
  modified_base 71: mod_base = OTHER; note = 2'-O-methyl modified nucleotide
  modified_base 72: mod_base = OTHER; note = 2'-O-methyl modified nucleotide
  modified_base 73: mod_base = OTHER; note = 2'-O-methyl modified nucleotide
  modified_base 74: mod_base = OTHER; note = 2'-O-methyl modified nucleotide
  modified_base 75: mod_base = OTHER; note = 2'-O-methyl modified nucleotide
  modified_base 76: mod_base = OTHER; note = 2'-O-methyl modified nucleotide
  modified_base 77: mod_base = OTHER; note = 2'-O-methyl modified nucleotide
  modified_base 78: mod_base = OTHER; note = 2'-O-methyl modified nucleotide
  modified_base 79: mod_base = OTHER; note = 2'-O-methyl modified nucleotide
  modified_base 80: mod_base = OTHER; note = 2'-O-methyl modified nucleotide
  modified_base 81: mod_base = OTHER; note = 2'-O-methyl modified nucleotide
  modified_base 82: mod_base = OTHER; note = 2'-O-methyl modified nucleotide
  modified_base 83: mod_base = OTHER; note = 2'-O-methyl modified nucleotide
  modified_base 84: mod_base = OTHER; note = 2'-O-methyl modified nucleotide
  modified_base 85: mod_base = OTHER; note = 2'-O-methyl modified nucleotide
  modified_base 86: mod_base = OTHER; note = 2'-O-methyl modified nucleotide
  modified_base 87: mod_base = OTHER; note = 2'-O-methyl modified nucleotide
  modified_base 88: mod_base = OTHER; note = 2'-O-methyl modified nucleotide
  modified_base 89: mod_base = OTHER; note = 2'-O-methyl modified nucleotide
  modified_base 90: mod_base = OTHER; note = 2'-O-methyl modified nucleotide
  modified_base 91: mod_base = OTHER; note = 2'-O-methyl modified nucleotide
  modified_base 92: mod_base = OTHER; note = 2'-O-methyl modified nucleotide
  modified_base 93: mod_base = OTHER; note = 2'-O-methyl modified nucleotide
  modified_base 94: mod_base = OTHER; note = 2'-O-methyl modified nucleotide
  modified_base 95: mod_base = OTHER; note = 2'-O-methyl modified nucleotide
  modified_base 96: mod_base = OTHER; note = 2'-O-methyl modified nucleotide
  modified_base 129: mod_base = OTHER; note = Nucleotide with phosphorothioate linkage
  modified_base 130: mod_base = OTHER; note = 2'-O-methyl modified nucleotide with phosphorothioate linkage
  modified_base 131: mod_base = OTHER; note = 2'-O-methyl modified nucleotide with phosphorothioate linkage
  modified_base 132: mod_base = OTHER; note = 2'-O-methyl modified nucleotide
gagtagcgcgagcacagctagttttagagctagaaatagcaagttaaaataaggctagtccgttatcaacttgaaaaagtggcaccgagtcggtgctctcgctccgtggccttagtgatctgtgctcgcgct

SEQ ID NO: 17728 - RNA, 131 nt, synthetic construct
  source 1..131: mol_type = other RNA
  modified_base 1: mod_base = OTHER; note = 2'-O-methyl modified nucleotide with phosphorothioate linkage
  modified_base 2: mod_base = OTHER; note = 2'-O-methyl modified nucleotide with phosphorothioate linkage
  modified_base 3: mod_base = OTHER; note = 2'-O-methyl modified nucleotide with phosphorothioate linkage
  modified_base 29: mod_base = OTHER; note = 2'-O-methyl modified nucleotide
  modified_base 30: mod_base = OTHER; note = 2'-O-methyl modified nucleotide
  modified_base 31: mod_base = OTHER; note = 2'-O-methyl modified nucleotide
  modified_base 32: mod_base = OTHER; note = 2'-O-methyl modified nucleotide
  modified_base 33: mod_base = OTHER; note = 2'-O-methyl modified nucleotide
  modified_base 34: mod_base = OTHER; note = 2'-O-methyl modified nucleotide
  modified_base 35: mod_base = OTHER; note = 2'-O-methyl modified nucleotide
  modified_base 36: mod_base = OTHER; note = 2'-O-methyl modified nucleotide
  modified_base 37: mod_base = OTHER; note = 2'-O-methyl modified nucleotide
  modified_base 38: mod_base = OTHER; note = 2'-O-methyl modified nucleotide
  modified_base 39: mod_base = OTHER; note = 2'-O-methyl modified nucleotide
  modified_base 40: mod_base = OTHER; note = 2'-O-methyl modified nucleotide
  modified_base 69: mod_base = OTHER; note = 2'-O-methyl modified nucleotide
  modified_base 70: mod_base = OTHER; note = 2'-O-methyl modified nucleotide
  modified_base 71: mod_base = OTHER; note = 2'-O-methyl modified nucleotide
  modified_base 72: mod_base = OTHER; note = 2'-O-methyl modified nucleotide
  modified_base 73: mod_base = OTHER; note = 2'-O-methyl modified nucleotide
  modified_base 74: mod_base = OTHER; note = 2'-O-methyl modified nucleotide
  modified_base 75: mod_base = OTHER; note = 2'-O-methyl modified nucleotide
  modified_base 76: mod_base = OTHER; note = 2'-O-methyl modified nucleotide
  modified_base 77: mod_base = OTHER; note = 2'-O-methyl modified nucleotide
  modified_base 78: mod_base = OTHER; note = 2'-O-methyl modified nucleotide
  modified_base 79: mod_base = OTHER; note = 2'-O-methyl modified nucleotide
  modified_base 80: mod_base = OTHER; note = 2'-O-methyl modified nucleotide
  modified_base 81: mod_base = OTHER; note = 2'-O-methyl modified nucleotide
  modified_base 82: mod_base = OTHER; note = 2'-O-methyl modified nucleotide
  modified_base 83: mod_base = OTHER; note = 2'-O-methyl modified nucleotide
  modified_base 84: mod_base = OTHER; note = 2'-O-methyl modified nucleotide
  modified_base 85: mod_base = OTHER; note = 2'-O-methyl modified nucleotide
  modified_base 86: mod_base = OTHER; note = 2'-O-methyl modified nucleotide
  modified_base 87: mod_base = OTHER; note = 2'-O-methyl modified nucleotide
  modified_base 88: mod_base = OTHER; note = 2'-O-methyl modified nucleotide
  modified_base 89: mod_base = OTHER; note = 2'-O-methyl modified nucleotide
  modified_base 90: mod_base = OTHER; note = 2'-O-methyl modified nucleotide
  modified_base 91: mod_base = OTHER; note = 2'-O-methyl modified nucleotide
  modified_base 92: mod_base = OTHER; note = 2'-O-methyl modified nucleotide
  modified_base 93: mod_base = OTHER; note = 2'-O-methyl modified nucleotide
  modified_base 94: mod_base = OTHER; note = 2'-O-methyl modified nucleotide
  modified_base 95: mod_base = OTHER; note = 2'-O-methyl modified nucleotide
  modified_base 96: mod_base = OTHER; note = 2'-O-methyl modified nucleotide
  modified_base 128: mod_base = OTHER; note = Nucleotide with phosphorothioate linkage
  modified_base 129: mod_base = OTHER; note = 2'-O-methyl modified nucleotide with phosphorothioate linkage
  modified_base 130: mod_base = OTHER; note = 2'-O-methyl modified nucleotide with phosphorothioate linkage
  modified_base 131: mod_base = OTHER; note = 2'-O-methyl modified nucleotide
gagtagcgcgagcacagctagttttagagctagaaatagcaagttaaaataaggctagtccgttatcaacttgaaaaagtggcaccgagtcggtgctctcgctccgtggccttagtgatctgtgctcgcgc

SEQ ID NO: 17729 - RNA, 130 nt, synthetic construct
  source 1..130: mol_type = other RNA
  modified_base 1: mod_base = OTHER; note = 2'-O-methyl modified nucleotide with phosphorothioate linkage
  modified_base 2: mod_base = OTHER; note = 2'-O-methyl modified nucleotide with phosphorothioate linkage
  modified_base 3: mod_base = OTHER; note = 2'-O-methyl modified nucleotide with phosphorothioate linkage
  modified_base 29: mod_base = OTHER; note = 2'-O-methyl modified nucleotide
  modified_base 30: mod_base = OTHER; note = 2'-O-methyl modified nucleotide
  modified_base 31: mod_base = OTHER; note = 2'-O-methyl modified nucleotide
  modified_base 32: mod_base = OTHER; note = 2'-O-methyl modified nucleotide
  modified_base 33: mod_base = OTHER; note = 2'-O-methyl modified nucleotide
  modified_base 34: mod_base = OTHER; note = 2'-O-methyl modified nucleotide
  modified_base 35: mod_base = OTHER; note = 2'-O-methyl modified nucleotide
  modified_base 36: mod_base = OTHER; note = 2'-O-methyl modified nucleotide
  modified_base 37: mod_base = OTHER; note = 2'-O-methyl modified nucleotide
  modified_base 38: mod_base = OTHER; note = 2'-O-methyl modified nucleotide
  modified_base 39: mod_base = OTHER; note = 2'-O-methyl modified nucleotide
  modified_base 40: mod_base = OTHER; note = 2'-O-methyl modified nucleotide
  modified_base 69: mod_base = OTHER; note = 2'-O-methyl modified nucleotide
  modified_base 70: mod_base = OTHER; note = 2'-O-methyl modified nucleotide
  modified_base 71: mod_base = OTHER; note = 2'-O-methyl modified nucleotide
  modified_base 72: mod_base = OTHER; note = 2'-O-methyl modified nucleotide
  modified_base 73: mod_base = OTHER; note = 2'-O-methyl modified nucleotide
  modified_base 74: mod_base = OTHER; note = 2'-O-methyl modified nucleotide
  modified_base 75: mod_base = OTHER; note = 2'-O-methyl modified nucleotide
  modified_base 76: mod_base = OTHER; note = 2'-O-methyl modified nucleotide
  modified_base 77: mod_base = OTHER; note = 2'-O-methyl modified nucleotide
  modified_base 78: mod_base = OTHER; note = 2'-O-methyl modified nucleotide
  modified_base 79: mod_base = OTHER; note = 2'-O-methyl modified nucleotide
  modified_base 80: mod_base = OTHER; note = 2'-O-methyl modified nucleotide
  modified_base 81: mod_base = OTHER; note = 2'-O-methyl modified nucleotide
  modified_base 82: mod_base = OTHER; note = 2'-O-methyl modified nucleotide
  modified_base 83: mod_base = OTHER; note = 2'-O-methyl modified nucleotide
  modified_base 84: mod_base = OTHER; note = 2'-O-methyl modified nucleotide
  modified_base 85: mod_base = OTHER; note = 2'-O-methyl modified nucleotide
  modified_base 86: mod_base = OTHER; note = 2'-O-methyl modified nucleotide
  modified_base 87: mod_base = OTHER; note = 2'-O-methyl modified nucleotide
  modified_base 88: mod_base = OTHER; note = 2'-O-methyl modified nucleotide
  modified_base 89: mod_base = OTHER; note = 2'-O-methyl modified nucleotide
  modified_base 90: mod_base = OTHER; note = 2'-O-methyl modified nucleotide
  modified_base 91: mod_base = OTHER; note = 2'-O-methyl modified nucleotide
  modified_base 92: mod_base = OTHER; note = 2'-O-methyl modified nucleotide
  modified_base 93: mod_base = OTHER; note = 2'-O-methyl modified nucleotide
  modified_base 94: mod_base = OTHER; note = 2'-O-methyl modified nucleotide
  modified_base 95: mod_base = OTHER; note = 2'-O-methyl modified nucleotide
  modified_base 96: mod_base = OTHER; note = 2'-O-methyl modified nucleotide
  modified_base 127: mod_base = OTHER; note = Nucleotide with phosphorothioate linkage
  modified_base 128: mod_base = OTHER; note = 2'-O-methyl modified nucleotide with phosphorothioate linkage
  modified_base 129: mod_base = OTHER; note = 2'-O-methyl modified nucleotide with phosphorothioate linkage
  modified_base 130: mod_base = OTHER; note = 2'-O-methyl modified nucleotide
gagtagcgcgagcacagctagttttagagctagaaatagcaagttaaaataaggctagtccgttatcaacttgaaaaagtggcaccgagtcggtgctctcgctccgtggccttagtgatctgtgctcgcg

SEQ ID NO: 17730 - RNA, 129 nt, synthetic construct
  source 1..129: mol_type = other RNA
  modified_base 1: mod_base = OTHER; note = 2'-O-methyl modified nucleotide with phosphorothioate linkage
  modified_base 2: mod_base = OTHER; note = 2'-O-methyl modified nucleotide with phosphorothioate linkage
  modified_base 3: mod_base = OTHER; note = 2'-O-methyl modified nucleotide with phosphorothioate linkage
  modified_base 29: mod_base = OTHER; note = 2'-O-methyl modified nucleotide
  modified_base 30: mod_base = OTHER; note = 2'-O-methyl modified nucleotide
  modified_base 31: mod_base = OTHER; note = 2'-O-methyl modified nucleotide
  modified_base 32: mod_base = OTHER; note = 2'-O-methyl modified nucleotide
  modified_base 33: mod_base = OTHER; note = 2'-O-methyl modified nucleotide
  modified_base 34: mod_base = OTHER; note = 2'-O-methyl modified nucleotide
  modified_base 35: mod_base = OTHER; note = 2'-O-methyl modified nucleotide
  modified_base 36: mod_base = OTHER; note = 2'-O-methyl modified nucleotide
  modified_base 37: mod_base = OTHER; note = 2'-O-methyl modified nucleotide
  modified_base 38: mod_base = OTHER; note = 2'-O-methyl modified nucleotide
  modified_base 39: mod_base = OTHER; note = 2'-O-methyl modified nucleotide
  modified_base 40: mod_base = OTHER; note = 2'-O-methyl modified nucleotide
  modified_base 69: mod_base = OTHER; note = 2'-O-methyl modified nucleotide
  modified_base 70: mod_base = OTHER; note = 2'-O-methyl modified nucleotide
  modified_base 71: mod_base = OTHER; note = 2'-O-methyl modified nucleotide
  modified_base 72: mod_base = OTHER; note = 2'-O-methyl modified nucleotide
  modified_base 73: mod_base = OTHER; note = 2'-O-methyl modified nucleotide
  modified_base 74: mod_base = OTHER; note = 2'-O-methyl modified nucleotide
  modified_base 75: mod_base = OTHER; note = 2'-O-methyl modified nucleotide
  modified_base 76: mod_base = OTHER; note = 2'-O-methyl modified nucleotide
  modified_base 77: mod_base = OTHER; note = 2'-O-methyl modified nucleotide
  modified_base 78: mod_base = OTHER; note = 2'-O-methyl modified nucleotide
  modified_base 79: mod_base = OTHER; note = 2'-O-methyl modified nucleotide
  modified_base 80: mod_base = OTHER; note = 2'-O-methyl modified nucleotide
  modified_base 81: mod_base = OTHER; note = 2'-O-methyl modified nucleotide
  modified_base 82: mod_base = OTHER; note = 2'-O-methyl modified nucleotide
  modified_base 83: mod_base = OTHER; note = 2'-O-methyl modified nucleotide
  modified_base 84: mod_base = OTHER; note = 2'-O-methyl modified nucleotide
  modified_base 85: mod_base = OTHER; note = 2'-O-methyl modified nucleotide
  modified_base 86: mod_base = OTHER; note = 2'-O-methyl modified nucleotide
  modified_base 87: mod_base = OTHER; note = 2'-O-methyl modified nucleotide
  modified_base 88: mod_base = OTHER; note = 2'-O-methyl modified nucleotide
  modified_base 89: mod_base = OTHER; note = 2'-O-methyl modified nucleotide
  modified_base 90: mod_base = OTHER; note = 2'-O-methyl modified nucleotide
  modified_base 91: mod_base = OTHER; note = 2'-O-methyl modified nucleotide
  modified_base 92: mod_base = OTHER; note = 2'-O-methyl modified nucleotide
  modified_base 93: mod_base = OTHER; note = 2'-O-methyl modified nucleotide
  modified_base 94: mod_base = OTHER; note = 2'-O-methyl modified nucleotide
  modified_base 95: mod_base = OTHER; note = 2'-O-methyl modified nucleotide
  modified_base 96: mod_base = OTHER; note = 2'-O-methyl modified nucleotide
  modified_base 126: mod_base = OTHER; note = Nucleotide with phosphorothioate linkage
  modified_base 127: mod_base = OTHER; note = 2'-O-methyl modified nucleotide with phosphorothioate linkage
  modified_base 128: mod_base = OTHER; note = 2'-O-methyl modified nucleotide with phosphorothioate linkage
  modified_base 129: mod_base = OTHER; note = 2'-O-methyl modified nucleotide
gagtagcgcgagcacagctagttttagagctagaaatagcaagttaaaataaggctagtccgttatcaacttgaaaaagtggcaccgagtcggtgctctcgctccgtggccttagtgatctgtgctcgc

SEQ ID NO: 17731 - RNA, 128 nt, synthetic construct
  source 1..128: mol_type = other RNA
  modified_base 1: mod_base = OTHER; note = 2'-O-methyl modified nucleotide with phosphorothioate linkage
  modified_base 2: mod_base = OTHER; note = 2'-O-methyl modified nucleotide with phosphorothioate linkage
  modified_base 3: mod_base = OTHER; note = 2'-O-methyl modified nucleotide with phosphorothioate linkage
  modified_base 29: mod_base = OTHER; note = 2'-O-methyl modified nucleotide
  modified_base 30: mod_base = OTHER; note = 2'-O-methyl modified nucleotide
  modified_base 31: mod_base = OTHER; note = 2'-O-methyl modified nucleotide
  modified_base 32: mod_base = OTHER; note = 2'-O-methyl modified nucleotide
  modified_base 33: mod_base = OTHER; note = 2'-O-methyl modified nucleotide
  modified_base 34: mod_base = OTHER; note = 2'-O-methyl modified nucleotide
  modified_base 35: mod_base = OTHER; note = 2'-O-methyl modified nucleotide
  modified_base 36: mod_base = OTHER; note = 2'-O-methyl modified nucleotide
  modified_base 37: mod_base = OTHER; note = 2'-O-methyl modified nucleotide
  modified_base 38: mod_base = OTHER; note = 2'-O-methyl modified nucleotide
  modified_base 39: mod_base = OTHER; note = 2'-O-methyl modified nucleotide
  modified_base 40: mod_base = OTHER; note = 2'-O-methyl modified nucleotide
  modified_base 69: mod_base = OTHER; note = 2'-O-methyl modified nucleotide
  modified_base 70: mod_base = OTHER; note = 2'-O-methyl modified nucleotide
  modified_base 71: mod_base = OTHER; note = 2'-O-methyl modified nucleotide
  modified_base 72: mod_base = OTHER; note = 2'-O-methyl modified nucleotide
  modified_base 73: mod_base = OTHER; note = 2'-O-methyl modified nucleotide
  modified_base 74: mod_base = OTHER; note = 2'-O-methyl modified nucleotide
  modified_base 75: mod_base = OTHER; note = 2'-O-methyl modified nucleotide
  modified_base 76: mod_base = OTHER; note = 2'-O-methyl modified nucleotide
  modified_base 77: mod_base = OTHER; note = 2'-O-methyl modified nucleotide
  modified_base 78: mod_base = OTHER; note = 2'-O-methyl modified nucleotide
  modified_base 79: mod_base = OTHER; note = 2'-O-methyl modified nucleotide
  modified_base 80: mod_base = OTHER; note = 2'-O-methyl modified nucleotide
  modified_base 81: mod_base = OTHER; note = 2'-O-methyl modified nucleotide
  modified_base 82: mod_base = OTHER; note = 2'-O-methyl modified nucleotide
  modified_base 83: mod_base = OTHER; note = 2'-O-methyl modified nucleotide
  modified_base 84: mod_base = OTHER; note = 2'-O-methyl modified nucleotide
  modified_base 85: mod_base = OTHER; note = 2'-O-methyl modified nucleotide
  modified_base 86: mod_base = OTHER; note = 2'-O-methyl modified nucleotide
  modified_base 87: mod_base = OTHER; note = 2'-O-methyl modified nucleotide
  modified_base 88: mod_base = OTHER; note = 2'-O-methyl modified nucleotide
  modified_base 89: mod_base = OTHER; note = 2'-O-methyl modified nucleotide
  modified_base 90: mod_base = OTHER; note = 2'-O-methyl modified nucleotide
  modified_base 91: mod_base = OTHER; note = 2'-O-methyl modified nucleotide
  modified_base 92: mod_base = OTHER; note = 2'-O-methyl modified nucleotide
  modified_base 93: mod_base = OTHER; note = 2'-O-methyl modified nucleotide
  modified_base 94: mod_base = OTHER; note = 2'-O-methyl modified nucleotide
  modified_base 95: mod_base = OTHER; note = 2'-O-methyl modified nucleotide
  modified_base 96: mod_base = OTHER; note = 2'-O-methyl modified nucleotide
  modified_base 125: mod_base = OTHER; note = Nucleotide with phosphorothioate linkage
  modified_base 126: mod_base = OTHER; note = 2'-O-methyl modified nucleotide with phosphorothioate linkage
  modified_base 127: mod_base = OTHER; note = 2'-O-methyl modified nucleotide with phosphorothioate linkage
  modified_base 128: mod_base = OTHER; note = 2'-O-methyl modified nucleotide
gagtagcgcgagcacagctagttttagagctagaaatagcaagttaaaataaggctagtccgttatcaacttgaaaaagtggcaccgagtcggtgctctcgctccgtggccttagtgatctgtgctcg

SEQ ID NO: 17732 - RNA, 127 nt, synthetic construct
  source 1..127: mol_type = other RNA
  modified_base 1: mod_base = OTHER; note = 2'-O-methyl modified nucleotide with phosphorothioate linkage
  modified_base 2: mod_base = OTHER; note = 2'-O-methyl modified nucleotide with phosphorothioate linkage
  modified_base 3: mod_base = OTHER; note = 2'-O-methyl modified nucleotide with phosphorothioate linkage
  modified_base 29: mod_base = OTHER; note = 2'-O-methyl modified nucleotide
  modified_base 30: mod_base = OTHER; note = 2'-O-methyl modified nucleotide
  modified_base 31: mod_base = OTHER; note = 2'-O-methyl modified nucleotide
  modified_base 32: mod_base = OTHER; note = 2'-O-methyl modified nucleotide
  modified_base 33: mod_base = OTHER; note = 2'-O-methyl modified nucleotide
  modified_base 34: mod_base = OTHER; note = 2'-O-methyl modified nucleotide
  modified_base 35: mod_base = OTHER; note = 2'-O-methyl modified nucleotide
  modified_base 36: mod_base = OTHER; note = 2'-O-methyl modified nucleotide
  modified_base 37: mod_base = OTHER; note = 2'-O-methyl modified nucleotide
  modified_base 38: mod_base = OTHER; note = 2'-O-methyl modified nucleotide
  modified_base 39: mod_base = OTHER; note = 2'-O-methyl modified nucleotide
  modified_base 40: mod_base = OTHER; note = 2'-O-methyl modified nucleotide
  modified_base 69: mod_base = OTHER; note = 2'-O-methyl modified nucleotide
  modified_base 70: mod_base = OTHER; note = 2'-O-methyl modified nucleotide
  modified_base 71: mod_base = OTHER; note = 2'-O-methyl modified nucleotide
  modified_base 72: mod_base = OTHER; note = 2'-O-methyl modified nucleotide
  modified_base 73: mod_base = OTHER; note = 2'-O-methyl modified nucleotide
  modified_base 74: mod_base = OTHER; note = 2'-O-methyl modified nucleotide
  modified_base 75: mod_base = OTHER; note = 2'-O-methyl modified nucleotide
  modified_base 76: mod_base = OTHER; note = 2'-O-methyl modified nucleotide
  modified_base 77: mod_base = OTHER; note = 2'-O-methyl modified nucleotide
  modified_base 78: mod_base = OTHER; note = 2'-O-methyl modified nucleotide
  modified_base 79: mod_base = OTHER; note = 2'-O-methyl modified nucleotide
  modified_base 80: mod_base = OTHER; note = 2'-O-methyl modified nucleotide
  modified_base 81: mod_base = OTHER; note = 2'-O-methyl modified nucleotide
  modified_base 82: mod_base = OTHER; note = 2'-O-methyl modified nucleotide
  modified_base 83: mod_base = OTHER; note = 2'-O-methyl modified nucleotide
  modified_base 84: mod_base = OTHER; note = 2'-O-methyl modified nucleotide
  modified_base 85: mod_base = OTHER; note = 2'-O-methyl modified nucleotide
  modified_base 86: mod_base = OTHER; note = 2'-O-methyl modified nucleotide
  modified_base 87: mod_base = OTHER; note = 2'-O-methyl modified nucleotide
  modified_base 88: mod_base = OTHER; note = 2'-O-methyl modified nucleotide
  modified_base 89: mod_base = OTHER; note = 2'-O-methyl modified nucleotide
  modified_base 90: mod_base = OTHER; note = 2'-O-methyl modified nucleotide
  modified_base 91: mod_base = OTHER; note = 2'-O-methyl modified nucleotide
  modified_base 92: mod_base = OTHER; note = 2'-O-methyl modified nucleotide
  modified_base 93: mod_base = OTHER; note = 2'-O-methyl modified nucleotide
  modified_base 94: mod_base = OTHER; note = 2'-O-methyl modified nucleotide
  modified_base 95: mod_base = OTHER; note = 2'-O-methyl modified nucleotide
  modified_base 96: mod_base = OTHER; note = 2'-O-methyl modified nucleotide
  modified_base 124: mod_base = OTHER; note = Nucleotide with phosphorothioate linkage
  modified_base 125: mod_base = OTHER; note = 2'-O-methyl modified nucleotide with phosphorothioate linkage
  modified_base 126: mod_base = OTHER; note = 2'-O-methyl modified nucleotide with phosphorothioate linkage
  modified_base 127: mod_base = OTHER; note = 2'-O-methyl modified nucleotide
gagtagcgcgagcacagctagttttagagctagaaatagcaagttaaaataaggctagtccgttatcaacttgaaaaagtggcaccgagtcggtgctctcgctccgtggccttagtgatctgtgctc

SEQ ID NO: 17733 - RNA, 120 nt, synthetic construct
  source 1..120: mol_type = other RNA
  modified_base 1: mod_base = OTHER; note = 2'-O-methyl modified nucleotide with phosphorothioate linkage
  modified_base 2: mod_base = OTHER; note = 2'-O-methyl modified nucleotide with phosphorothioate linkage
  modified_base 3: mod_base = OTHER; note = 2'-O-methyl modified nucleotide with phosphorothioate linkage
  modified_base 29: mod_base = OTHER; note = 2'-O-methyl modified nucleotide
  modified_base 30: mod_base = OTHER; note = 2'-O-methyl modified nucleotide
  modified_base 31: mod_base = OTHER; note = 2'-O-methyl modified nucleotide
  modified_base 32: mod_base = OTHER; note = 2'-O-methyl modified nucleotide
  modified_base 33: mod_base = OTHER; note = 2'-O-methyl modified nucleotide
  modified_base 34: mod_base = OTHER; note = 2'-O-methyl modified nucleotide
  modified_base 35: mod_base = OTHER; note = 2'-O-methyl modified nucleotide
  modified_base 36: mod_base = OTHER; note = 2'-O-methyl modified nucleotide
  modified_base 37: mod_base = OTHER; note = 2'-O-methyl modified nucleotide
  modified_base 38: mod_base = OTHER; note = 2'-O-methyl modified nucleotide
  modified_base 39: mod_base = OTHER; note = 2'-O-methyl modified nucleotide
  modified_base 40: mod_base = OTHER; note = 2'-O-methyl modified nucleotide
  modified_base 69: mod_base = OTHER; note = 2'-O-methyl modified nucleotide
  modified_base 70: mod_base = OTHER; note = 2'-O-methyl modified nucleotide
  modified_base 71: mod_base = OTHER; note = 2'-O-methyl modified nucleotide
  modified_base 72: mod_base = OTHER; note = 2'-O-methyl modified nucleotide
  modified_base 73: mod_base = OTHER; note = 2'-O-methyl modified nucleotide
  modified_base 74: mod_base = OTHER; note = 2'-O-methyl modified nucleotide
  modified_base 75: mod_base = OTHER; note = 2'-O-methyl modified nucleotide
  modified_base 76: mod_base = OTHER; note = 2'-O-methyl modified nucleotide
  modified_base 77: mod_base = OTHER; note = 2'-O-methyl modified nucleotide
  modified_base 78: mod_base = OTHER; note = 2'-O-methyl modified nucleotide
  modified_base 79: mod_base = OTHER; note = 2'-O-methyl modified nucleotide
  modified_base 80: mod_base = OTHER; note = 2'-O-methyl modified nucleotide
  modified_base 81: mod_base = OTHER; note = 2'-O-methyl modified nucleotide
  modified_base 82: mod_base = OTHER; note = 2'-O-methyl modified nucleotide
  modified_base 83: mod_base = OTHER; note = 2'-O-methyl modified nucleotide
  modified_base 84: mod_base = OTHER; note = 2'-O-methyl modified nucleotide
  modified_base 85: mod_base = OTHER; note = 2'-O-methyl modified nucleotide
  modified_base 86: mod_base = OTHER; note = 2'-O-methyl modified nucleotide
  modified_base 87: mod_base = OTHER; note = 2'-O-methyl modified nucleotide
  modified_base 88: mod_base = OTHER; note = 2'-O-methyl modified nucleotide
  modified_base 89: mod_base = OTHER; note = 2'-O-methyl modified nucleotide
  modified_base 90: mod_base = OTHER; note = 2'-O-methyl modified nucleotide
  modified_base 91: mod_base = OTHER; note = 2'-O-methyl modified nucleotide
  modified_base 92: mod_base = OTHER; note = 2'-O-methyl modified nucleotide
  modified_base 93: mod_base = OTHER; note = 2'-O-methyl modified nucleotide
  modified_base 94: mod_base = OTHER; note = 2'-O-methyl modified nucleotide
  modified_base 95: mod_base = OTHER; note = 2'-O-methyl modified nucleotide
  modified_base 96: mod_base = OTHER; note = 2'-O-methyl modified nucleotide
  modified_base 117: mod_base = OTHER; note = Nucleotide with phosphorothioate linkage
  modified_base 118: mod_base = OTHER; note = 2'-O-methyl modified nucleotide with phosphorothioate linkage
  modified_base 119: mod_base = OTHER; note = 2'-O-methyl modified nucleotide with phosphorothioate linkage
  modified_base 120: mod_base = OTHER; note = 2'-O-methyl modified nucleotide
gagtagcgcgagcacagctagttttagagctagaaatagcaagttaaaataaggctagtccgttatcaacttgaaaaagtggcaccgagtcggtgcgccttagtaacctgtgctcgcgct

SEQ ID NO: 17734 - RNA, 119 nt, synthetic construct
  source 1..119: mol_type = other RNA
  modified_base 1: mod_base = OTHER; note = 2'-O-methyl modified nucleotide with phosphorothioate linkage
  modified_base 2: mod_base = OTHER; note = 2'-O-methyl modified nucleotide with phosphorothioate linkage
  modified_base 3: mod_base = OTHER; note = 2'-O-methyl modified nucleotide with phosphorothioate linkage
  modified_base 29: mod_base = OTHER; note = 2'-O-methyl modified nucleotide
  modified_base 30: mod_base = OTHER; note = 2'-O-methyl modified nucleotide
  modified_base 31: mod_base = OTHER; note = 2'-O-methyl modified nucleotide
  modified_base 32: mod_base = OTHER; note = 2'-O-methyl modified nucleotide
  modified_base 33: mod_base = OTHER; note = 2'-O-methyl modified nucleotide
  modified_base 34: mod_base = OTHER; note = 2'-O-methyl modified nucleotide
  modified_base 35: mod_base = OTHER; note = 2'-O-methyl modified nucleotide
  modified_base 36: mod_base = OTHER; note = 2'-O-methyl modified nucleotide
  modified_base 37: mod_base = OTHER; note = 2'-O-methyl modified nucleotide
  modified_base 38: mod_base = OTHER; note = 2'-O-methyl modified nucleotide
  modified_base 39: mod_base = OTHER; note = 2'-O-methyl modified nucleotide
  modified_base 40: mod_base = OTHER; note = 2'-O-methyl modified nucleotide
  modified_base 69: mod_base = OTHER; note = 2'-O-methyl modified nucleotide
  modified_base 70: mod_base = OTHER; note = 2'-O-methyl modified nucleotide
  modified_base 71: mod_base = OTHER; note = 2'-O-methyl modified nucleotide
  modified_base 72: mod_base = OTHER; note = 2'-O-methyl modified nucleotide
  modified_base 73: mod_base = OTHER; note = 2'-O-methyl modified nucleotide
  modified_base 74: mod_base = OTHER; note = 2'-O-methyl modified nucleotide
  modified_base 75: mod_base = OTHER; note = 2'-O-methyl modified nucleotide
  modified_base 76: mod_base = OTHER; note = 2'-O-methyl modified nucleotide
  modified_base 77: mod_base = OTHER; note = 2'-O-methyl modified nucleotide
  modified_base 78: mod_base = OTHER; note = 2'-O-methyl modified nucleotide
  modified_base 79: mod_base = OTHER; note = 2'-O-methyl modified nucleotide
  modified_base 80: mod_base = OTHER; note = 2'-O-methyl modified nucleotide
  modified_base 81: mod_base = OTHER; note = 2'-O-methyl modified nucleotide
  modified_base 82: mod_base = OTHER; note = 2'-O-methyl modified nucleotide
  modified_base 83: mod_base = OTHER; note = 2'-O-methyl modified nucleotide
  modified_base 84: mod_base = OTHER; note = 2'-O-methyl modified nucleotide
  modified_base 85: mod_base = OTHER; note = 2'-O-methyl modified nucleotide
  modified_base 86: mod_base = OTHER; note = 2'-O-methyl modified nucleotide
  modified_base 87: mod_base = OTHER; note = 2'-O-methyl modified nucleotide
  modified_base 88: mod_base = OTHER; note = 2'-O-methyl modified nucleotide
  modified_base 89: mod_base = OTHER; note = 2'-O-methyl modified nucleotide
  modified_base 90: mod_base = OTHER; note = 2'-O-methyl modified nucleotide
  modified_base 91: mod_base = OTHER; note = 2'-O-methyl modified nucleotide
  modified_base 92: mod_base = OTHER; note = 2'-O-methyl modified nucleotide
  modified_base 93: mod_base = OTHER; note = 2'-O-methyl modified nucleotide
  modified_base 94: mod_base = OTHER; note = 2'-O-methyl modified nucleotide
  modified_base 95: mod_base = OTHER; note = 2'-O-methyl modified nucleotide
  modified_base 96: mod_base = OTHER; note = 2'-O-methyl modified nucleotide
  modified_base 116: mod_base = OTHER; note = Nucleotide with phosphorothioate linkage
  modified_base 117: mod_base = OTHER; note = 2'-O-methyl modified nucleotide with phosphorothioate linkage
  modified_base 118: mod_base = OTHER; note = 2'-O-methyl modified nucleotide with phosphorothioate linkage
  modified_base 119: mod_base = OTHER; note = 2'-O-methyl modified nucleotide
gagtagcgcgagcacagctagttttagagctagaaatagcaagttaaaataaggctagtccgttatcaacttgaaaaagtggcaccgagtcggtgcgccttagtaacctgtgctcgcgc

SEQ ID NO: 17735 - RNA, 118 nt, synthetic construct
  source 1..118: mol_type = other RNA
  modified_base 1: mod_base = OTHER; note = 2'-O-methyl modified nucleotide with phosphorothioate linkage
  modified_base 2: mod_base = OTHER; note = 2'-O-methyl modified nucleotide with phosphorothioate linkage
  modified_base 3: mod_base = OTHER; note = 2'-O-methyl modified nucleotide with phosphorothioate linkage
  modified_base 29: mod_base = OTHER; note = 2'-O-methyl modified nucleotide
  modified_base 30: mod_base = OTHER; note = 2'-O-methyl modified nucleotide
  modified_base 31: mod_base = OTHER; note = 2'-O-methyl modified nucleotide
  modified_base 32: mod_base = OTHER; note = 2'-O-methyl modified nucleotide
  modified_base 33: mod_base = OTHER; note = 2'-O-methyl modified nucleotide
  modified_base 34: mod_base = OTHER; note = 2'-O-methyl modified nucleotide
  modified_base 35: mod_base = OTHER; note = 2'-O-methyl modified nucleotide
  modified_base 36: mod_base = OTHER; note = 2'-O-methyl modified nucleotide
  modified_base 37: mod_base = OTHER; note = 2'-O-methyl modified nucleotide
  modified_base 38: mod_base = OTHER; note = 2'-O-methyl modified nucleotide
  modified_base 39: mod_base = OTHER; note = 2'-O-methyl modified nucleotide
  modified_base 40: mod_base = OTHER; note = 2'-O-methyl modified nucleotide
  modified_base 69: mod_base = OTHER; note = 2'-O-methyl modified nucleotide
  modified_base 70: mod_base = OTHER; note = 2'-O-methyl modified nucleotide
  modified_base 71: mod_base = OTHER; note = 2'-O-methyl modified nucleotide
  modified_base 72: mod_base = OTHER; note = 2'-O-methyl modified nucleotide
  modified_base 73: mod_base = OTHER; note = 2'-O-methyl modified nucleotide
  modified_base 74: mod_base = OTHER; note = 2'-O-methyl modified nucleotide
  modified_base 75: mod_base = OTHER; note = 2'-O-methyl modified nucleotide
  modified_base 76: mod_base = OTHER; note = 2'-O-methyl modified nucleotide
  modified_base 77: mod_base = OTHER; note = 2'-O-methyl modified nucleotide
  modified_base 78: mod_base = OTHER; note = 2'-O-methyl modified nucleotide
  modified_base 79: mod_base = OTHER; note = 2'-O-methyl modified nucleotide
  modified_base 80: mod_base = OTHER; note = 2'-O-methyl modified nucleotide
  modified_base 81: mod_base = OTHER; note = 2'-O-methyl modified nucleotide
  modified_base 82: mod_base = OTHER; note = 2'-O-methyl modified nucleotide
  modified_base 83: mod_base = OTHER; note = 2'-O-methyl modified nucleotide
  modified_base 84: mod_base = OTHER; note = 2'-O-methyl modified nucleotide
  modified_base 85: mod_base = OTHER; note = 2'-O-methyl modified nucleotide
  modified_base 86: mod_base = OTHER; note = 2'-O-methyl modified nucleotide
  modified_base 87: mod_base = OTHER; note = 2'-O-methyl modified nucleotide
  modified_base 88: mod_base = OTHER; note = 2'-O-methyl modified nucleotide
  modified_base 89: mod_base = OTHER; note = 2'-O-methyl modified nucleotide
  modified_base 90: mod_base = OTHER; note = 2'-O-methyl modified nucleotide
  modified_base 91: mod_base = OTHER; note = 2'-O-methyl modified nucleotide
  modified_base 92: mod_base = OTHER; note = 2'-O-methyl modified nucleotide
  modified_base 93: mod_base = OTHER; note = 2'-O-methyl modified nucleotide
  modified_base 94: mod_base = OTHER; note = 2'-O-methyl modified nucleotide
  modified_base 95: mod_base = OTHER; note = 2'-O-methyl modified nucleotide
  modified_base 96: mod_base = OTHER; note = 2'-O-methyl modified nucleotide
  modified_base 115: mod_base = OTHER; note = Nucleotide with phosphorothioate linkage
  modified_base 116: mod_base = OTHER; note = 2'-O-methyl modified nucleotide with phosphorothioate linkage
  modified_base 117: mod_base = OTHER; note = 2'-O-methyl modified nucleotide with phosphorothioate linkage
  modified_base 118: mod_base = OTHER; note = 2'-O-methyl modified nucleotide
gagtagcgcgagcacagctagttttagagctagaaatagcaagttaaaataaggctagtccgttatcaacttgaaaaagtggcaccgagtcggtgcgccttagtaacctgtgctcgcg

SEQ ID NO: 17736 - RNA, 117 nt, synthetic construct
  source 1..117: mol_type = other RNA
  modified_base 1: mod_base = OTHER; note = 2'-O-methyl modified nucleotide with phosphorothioate linkage
  modified_base 2: mod_base = OTHER; note = 2'-O-methyl modified nucleotide with phosphorothioate linkage
  modified_base 3: mod_base = OTHER; note = 2'-O-methyl modified nucleotide with phosphorothioate linkage
  modified_base 29: mod_base = OTHER; note = 2'-O-methyl modified nucleotide
  modified_base 30: mod_base = OTHER; note = 2'-O-methyl modified nucleotide
  modified_base 31: mod_base = OTHER; note = 2'-O-methyl modified nucleotide
  modified_base 32: mod_base = OTHER; note = 2'-O-methyl modified nucleotide
  modified_base 33: mod_base = OTHER; note = 2'-O-methyl modified nucleotide
  modified_base 34: mod_base = OTHER; note = 2'-O-methyl modified nucleotide
  modified_base 35: mod_base = OTHER; note = 2'-O-methyl modified nucleotide
  modified_base 36: mod_base = OTHER; note = 2'-O-methyl modified nucleotide
  modified_base 37: mod_base = OTHER; note = 2'-O-methyl modified nucleotide
  modified_base 38: mod_base = OTHER; note = 2'-O-methyl modified nucleotide
  modified_base 39: mod_base = OTHER; note = 2'-O-methyl modified nucleotide
  modified_base 40: mod_base = OTHER; note = 2'-O-methyl modified nucleotide
  modified_base 69: mod_base = OTHER; note = 2'-O-methyl modified nucleotide
  modified_base 70: mod_base = OTHER; note = 2'-O-methyl modified nucleotide
  modified_base 71: mod_base = OTHER; note = 2'-O-methyl modified nucleotide
  modified_base 72: mod_base = OTHER; note = 2'-O-methyl modified nucleotide
  modified_base 73: mod_base = OTHER; note = 2'-O-methyl modified nucleotide
  modified_base 74: mod_base = OTHER; note = 2'-O-methyl modified nucleotide
  modified_base 75: mod_base = OTHER; note = 2'-O-methyl modified nucleotide
  modified_base 76: mod_base = OTHER; note = 2'-O-methyl modified nucleotide
  modified_base 77: mod_base = OTHER; note = 2'-O-methyl modified nucleotide
  modified_base 78: mod_base = OTHER; note = 2'-O-methyl modified nucleotide
  modified_base 79: mod_base = OTHER; note = 2'-O-methyl modified nucleotide
  modified_base 80: mod_base = OTHER; note = 2'-O-methyl modified nucleotide
  modified_base 81: mod_base = OTHER; note = 2'-O-methyl modified nucleotide
  modified_base 82: mod_base = OTHER; note = 2'-O-methyl modified nucleotide
  modified_base 83: mod_base = OTHER; note = 2'-O-methyl modified nucleotide
  modified_base 84: mod_base = OTHER; note = 2'-O-methyl modified nucleotide
  modified_base 85: mod_base = OTHER; note = 2'-O-methyl modified nucleotide
  modified_base 86: mod_base = OTHER; note = 2'-O-methyl modified nucleotide
  modified_base 87: mod_base = OTHER; note = 2'-O-methyl modified nucleotide
  modified_base 88: mod_base = OTHER; note = 2'-O-methyl modified nucleotide
  modified_base 89: mod_base = OTHER; note = 2'-O-methyl modified nucleotide
  modified_base 90: mod_base = OTHER; note = 2'-O-methyl modified nucleotide
  modified_base 91: mod_base = OTHER; note = 2'-O-methyl modified nucleotide
  modified_base 92: mod_base = OTHER; note = 2'-O-methyl modified nucleotide
  modified_base 93: mod_base = OTHER; note = 2'-O-methyl modified nucleotide
  modified_base 94: mod_base = OTHER; note = 2'-O-methyl modified nucleotide
  modified_base 95: mod_base = OTHER; note = 2'-O-methyl modified nucleotide
  modified_base 96: mod_base = OTHER; note = 2'-O-methyl modified nucleotide
  modified_base 114: mod_base = OTHER; note = Nucleotide with phosphorothioate linkage
  modified_base 115: mod_base = OTHER; note = 2'-O-methyl modified nucleotide with phosphorothioate linkage
  modified_base 116: mod_base = OTHER; note = 2'-O-methyl modified nucleotide with phosphorothioate linkage
  modified_base 117: mod_base = OTHER; note = 2'-O-methyl modified nucleotide
gagtagcgcgagcacagctagttttagagctagaaatagcaagttaaaataaggctagtccgttatcaacttgaaaaagtggcaccgagtcggtgcgccttagtaacctgtgctcgc

SEQ ID NO: 17737 - RNA, 116 nt, synthetic construct
  source 1..116: mol_type = other RNA
  modified_base 1: mod_base = OTHER; note = 2'-O-methyl modified nucleotide with phosphorothioate linkage
  modified_base 2: mod_base = OTHER; note = 2'-O-methyl modified nucleotide with phosphorothioate linkage
  modified_base 3: mod_base = OTHER; note = 2'-O-methyl modified nucleotide with phosphorothioate linkage
  modified_base 29: mod_base = OTHER; note = 2'-O-methyl modified nucleotide
  modified_base 30: mod_base = OTHER; note = 2'-O-methyl modified nucleotide
  modified_base 31: mod_base = OTHER; note = 2'-O-methyl modified nucleotide
  modified_base 32: mod_base = OTHER; note = 2'-O-methyl modified nucleotide
  modified_base 33: mod_base = OTHER; note = 2'-O-methyl modified nucleotide
  modified_base 34: mod_base = OTHER; note = 2'-O-methyl modified nucleotide
  modified_base 35: mod_base = OTHER; note = 2'-O-methyl modified nucleotide
  modified_base 36: mod_base = OTHER; note = 2'-O-methyl modified nucleotide
  modified_base 37: mod_base = OTHER; note = 2'-O-methyl modified nucleotide
  modified_base 38: mod_base = OTHER; note = 2'-O-methyl modified nucleotide
  modified_base 39: mod_base = OTHER; note = 2'-O-methyl modified nucleotide
  modified_base 40: mod_base = OTHER; note = 2'-O-methyl modified nucleotide
  modified_base 69: mod_base = OTHER; note = 2'-O-methyl modified nucleotide
  modified_base 70: mod_base = OTHER; note = 2'-O-methyl modified nucleotide
  modified_base 71: mod_base = OTHER; note = 2'-O-methyl modified nucleotide
  modified_base 72: mod_base = OTHER; note = 2'-O-methyl modified nucleotide
  modified_base 73: mod_base = OTHER; note = 2'-O-methyl modified nucleotide
  modified_base 74: mod_base = OTHER; note = 2'-O-methyl modified nucleotide
  modified_base 75: mod_base = OTHER; note = 2'-O-methyl modified nucleotide
  modified_base 76: mod_base = OTHER; note = 2'-O-methyl modified nucleotide
  modified_base 77: mod_base = OTHER; note = 2'-O-methyl modified nucleotide
  modified_base 78: mod_base = OTHER; note = 2'-O-methyl modified nucleotide
  modified_base 79: mod_base = OTHER; note = 2'-O-methyl modified nucleotide
  modified_base 80: mod_base = OTHER; note = 2'-O-methyl modified nucleotide
  modified_base 81: mod_base = OTHER; note = 2'-O-methyl modified nucleotide
  modified_base 82: mod_base = OTHER; note = 2'-O-methyl modified nucleotide
  modified_base 83: mod_base = OTHER; note = 2'-O-methyl modified nucleotide
  modified_base 84: mod_base = OTHER; note = 2'-O-methyl modified nucleotide
  modified_base 85: mod_base = OTHER; note = 2'-O-methyl modified nucleotide
  modified_base 86: mod_base = OTHER; note = 2'-O-methyl modified nucleotide
  modified_base 87: mod_base = OTHER; note = 2'-O-methyl modified nucleotide
  modified_base 88: mod_base = OTHER; note = 2'-O-methyl modified nucleotide
  modified_base 89: mod_base = OTHER; note = 2'-O-methyl modified nucleotide
  modified_base 90: mod_base = OTHER; note = 2'-O-methyl modified nucleotide
  modified_base 91: mod_base = OTHER; note = 2'-O-methyl modified nucleotide
  modified_base 92: mod_base = OTHER; note = 2'-O-methyl modified nucleotide
  modified_base 93: mod_base = OTHER; note = 2'-O-methyl modified nucleotide
  modified_base 94: mod_base = OTHER; note = 2'-O-methyl modified nucleotide
  modified_base 95: mod_base = OTHER; note = 2'-O-methyl modified nucleotide
  modified_base 96: mod_base = OTHER; note = 2'-O-methyl modified nucleotide
  modified_base 113: mod_base = OTHER; note = Nucleotide with phosphorothioate linkage
  modified_base 114: mod_base = OTHER; note = 2'-O-methyl modified nucleotide with phosphorothioate linkage
  modified_base 115: mod_base = OTHER; note = 2'-O-methyl modified nucleotide with phosphorothioate linkage
  modified_base 116: mod_base = OTHER; note = 2'-O-methyl modified nucleotide
gagtagcgcgagcacagctagttttagagctagaaatagcaagttaaaataaggctagtccgttatcaacttgaaaaagtggcaccgagtcggtgcgccttagtaacctgtgctcg

SEQ ID NO: 17738 - RNA, 115 nt, synthetic construct
  source 1..115: mol_type = other RNA
  modified_base 1: mod_base = OTHER; note = 2'-O-methyl modified nucleotide with phosphorothioate linkage
  modified_base 2: mod_base = OTHER; note = 2'-O-methyl modified nucleotide with phosphorothioate linkage
  modified_base 3: mod_base = OTHER; note = 2'-O-methyl modified nucleotide with phosphorothioate linkage
  modified_base 29: mod_base = OTHER; note = 2'-O-methyl modified nucleotide
  modified_base 30: mod_base = OTHER; note = 2'-O-methyl modified nucleotide
  modified_base 31: mod_base = OTHER; note = 2'-O-methyl modified nucleotide
  modified_base 32: mod_base = OTHER; note = 2'-O-methyl modified nucleotide
  modified_base 33: mod_base = OTHER; note = 2'-O-methyl modified nucleotide
  modified_base 34: mod_base = OTHER; note = 2'-O-methyl modified nucleotide
  modified_base 35: mod_base = OTHER; note = 2'-O-methyl modified nucleotide
  modified_base 36: mod_base = OTHER; note = 2'-O-methyl modified nucleotide
  modified_base 37: mod_base = OTHER; note = 2'-O-methyl modified nucleotide
  modified_base 38: mod_base = OTHER; note = 2'-O-methyl modified nucleotide
  modified_base 39: mod_base = OTHER; note = 2'-O-methyl modified nucleotide
  modified_base 40: mod_base = OTHER; note = 2'-O-methyl modified nucleotide
  modified_base 69: mod_base = OTHER; note = 2'-O-methyl modified nucleotide
  modified_base 70: mod_base = OTHER; note = 2'-O-methyl modified nucleotide
  modified_base 71: mod_base = OTHER; note = 2'-O-methyl modified nucleotide
  modified_base 72: mod_base = OTHER; note = 2'-O-methyl modified nucleotide
  modified_base 73: mod_base = OTHER; note = 2'-O-methyl modified nucleotide
  modified_base 74: mod_base = OTHER; note = 2'-O-methyl modified nucleotide
  modified_base 75: mod_base = OTHER; note = 2'-O-methyl modified nucleotide
  modified_base 76: mod_base = OTHER; note = 2'-O-methyl modified nucleotide
  modified_base 77: mod_base = OTHER; note = 2'-O-methyl modified nucleotide
  modified_base 78: mod_base = OTHER; note = 2'-O-methyl modified nucleotide
  modified_base 79: mod_base = OTHER; note = 2'-O-methyl modified nucleotide
  modified_base 80: mod_base = OTHER; note = 2'-O-methyl modified nucleotide
  modified_base 81: mod_base = OTHER; note = 2'-O-methyl modified nucleotide
  modified_base 82: mod_base = OTHER; note = 2'-O-methyl modified nucleotide
  modified_base 83: mod_base = OTHER; note = 2'-O-methyl modified nucleotide
  modified_base 84: mod_base = OTHER; note = 2'-O-methyl modified nucleotide
  modified_base 85: mod_base = OTHER; note = 2'-O-methyl modified nucleotide
  modified_base 86: mod_base = OTHER; note = 2'-O-methyl modified nucleotide
  modified_base 87: mod_base = OTHER; note = 2'-O-methyl modified nucleotide
  modified_base 88: mod_base = OTHER; note = 2'-O-methyl modified nucleotide
  modified_base 89: mod_base = OTHER; note = 2'-O-methyl modified nucleotide
  modified_base 90: mod_base = OTHER; note = 2'-O-methyl modified nucleotide
  modified_base 91: mod_base = OTHER; note = 2'-O-methyl modified nucleotide
  modified_base 92: mod_base = OTHER; note = 2'-O-methyl modified nucleotide
  modified_base 93: mod_base = OTHER; note = 2'-O-methyl modified nucleotide
  modified_base 94: mod_base = OTHER; note = 2'-O-methyl modified nucleotide
  modified_base 95: mod_base = OTHER; note = 2'-O-methyl modified nucleotide
  modified_base 96: mod_base = OTHER; note = 2'-O-methyl modified nucleotide
  modified_base 112: mod_base = OTHER; note = Nucleotide with phosphorothioate linkage
  modified_base 113: mod_base = OTHER; note = 2'-O-methyl modified nucleotide with phosphorothioate linkage
  modified_base 114: mod_base = OTHER; note = 2'-O-methyl modified nucleotide with phosphorothioate linkage
  modified_base 115: mod_base = OTHER; note = 2'-O-methyl modified nucleotide
gagtagcgcgagcacagctagttttagagctagaaatagcaagttaaaataaggctagtccgttatcaacttgaaaaagtggcaccgagtcggtgcgccttagtaacctgtgctc

SEQ ID NO: 17739 - RNA, 122 nt, synthetic construct
  source 1..122: mol_type = other RNA
  modified_base 1: mod_base = OTHER; note = 2'-O-methyl modified nucleotide with phosphorothioate linkage
  modified_base 2: mod_base = OTHER; note = 2'-O-methyl modified nucleotide with phosphorothioate linkage
  modified_base 3: mod_base = OTHER; note = 2'-O-methyl modified nucleotide with phosphorothioate linkage
  modified_base 29: mod_base = OTHER; note = 2'-O-methyl modified nucleotide
  modified_base 30: mod_base = OTHER; note = 2'-O-methyl modified nucleotide
  modified_base 31: mod_base = OTHER; note = 2'-O-methyl modified nucleotide
  modified_base 32: mod_base = OTHER; note = 2'-O-methyl modified nucleotide
  modified_base 33: mod_base = OTHER; note = 2'-O-methyl modified nucleotide
  modified_base 34: mod_base = OTHER; note = 2'-O-methyl modified nucleotide
  modified_base 35: mod_base = OTHER; note = 2'-O-methyl modified nucleotide
  modified_base 36: mod_base = OTHER; note = 2'-O-methyl modified nucleotide
  modified_base 37: mod_base = OTHER; note = 2'-O-methyl modified nucleotide
  modified_base 38: mod_base = OTHER; note = 2'-O-methyl modified nucleotide
  modified_base 39: mod_base = OTHER; note = 2'-O-methyl modified nucleotide
  modified_base 40: mod_base = OTHER; note = 2'-O-methyl modified nucleotide
  modified_base 69: mod_base = OTHER; note = 2'-O-methyl modified nucleotide
  modified_base 70: mod_base = OTHER; note = 2'-O-methyl modified nucleotide
  modified_base 71: mod_base = OTHER; note = 2'-O-methyl modified nucleotide
  modified_base 72: mod_base = OTHER; note = 2'-O-methyl modified nucleotide
  modified_base 73: mod_base = OTHER; note = 2'-O-methyl modified nucleotide
  modified_base 74: mod_base = OTHER; note = 2'-O-methyl modified nucleotide
  modified_base 75: mod_base = OTHER; note = 2'-O-methyl modified nucleotide
  modified_base 76: mod_base = OTHER; note = 2'-O-methyl modified nucleotide
  modified_base 77: mod_base = OTHER; note = 2'-O-methyl modified nucleotide
  modified_base 78: mod_base = OTHER; note = 2'-O-methyl modified nucleotide
  modified_base 79: mod_base = OTHER; note = 2'-O-methyl modified nucleotide
  modified_base 80: mod_base = OTHER; note = 2'-O-methyl modified nucleotide
  modified_base 81: mod_base = OTHER; note = 2'-O-methyl modified nucleotide
  modified_base 82: mod_base = OTHER; note = 2'-O-methyl modified nucleotide
  modified_base 83: mod_base = OTHER; note = 2'-O-methyl modified nucleotide
  modified_base 84: mod_base = OTHER; note = 2'-O-methyl modified nucleotide
  modified_base 85: mod_base = OTHER; note = 2'-O-methyl modified nucleotide
  modified_base 86: mod_base = OTHER; note = 2'-O-methyl modified nucleotide
  modified_base 87: mod_base = OTHER; note = 2'-O-methyl modified nucleotide
  modified_base 88: mod_base = OTHER; note = 2'-O-methyl modified nucleotide
  modified_base 89: mod_base = OTHER; note = 2'-O-methyl modified nucleotide
  modified_base 90: mod_base = OTHER; note = 2'-O-methyl modified nucleotide
  modified_base 91: mod_base = OTHER; note = 2'-O-methyl modified nucleotide
  modified_base 92: mod_base = OTHER; note = 2'-O-methyl modified nucleotide
  modified_base 93: mod_base = OTHER; note = 2'-O-methyl modified nucleotide
  modified_base 94: mod_base = OTHER; note = 2'-O-methyl modified nucleotide
  modified_base 95: mod_base = OTHER; note = 2'-O-methyl modified nucleotide
  modified_base 96: mod_base = OTHER; note = 2'-O-methyl modified nucleotide
  modified_base 119: mod_base = OTHER; note = Nucleotide with phosphorothioate linkage
  modified_base 120: mod_base = OTHER; note = 2'-O-methyl modified nucleotide with phosphorothioate linkage
  modified_base 121: mod_base = OTHER; note = 2'-O-methyl modified nucleotide with phosphorothioate linkage
  modified_base 122: mod_base = OTHER; note = 2'-O-methyl modified nucleotide
gagtagcgcgagcacagctagttttagagctagaaatagcaagttaaaataaggctagtccgttatcaacttgaaaaagtggcaccgagtcggtgctggccttagtaacctgtgctcgcgct

SEQ ID NO: 17740 - RNA, 121 nt, synthetic construct
  source 1..121: mol_type = other RNA
  modified_base 1: mod_base = OTHER; note = 2'-O-methyl modified nucleotide with phosphorothioate linkage
  modified_base 2: mod_base = OTHER; note = 2'-O-methyl modified nucleotide with phosphorothioate linkage
  modified_base 3: mod_base = OTHER; note = 2'-O-methyl modified nucleotide with phosphorothioate linkage
  modified_base 29: mod_base = OTHER; note = 2'-O-methyl modified nucleotide
  modified_base 30: mod_base = OTHER; note = 2'-O-methyl modified nucleotide
  modified_base 31: mod_base = OTHER; note = 2'-O-methyl modified nucleotide
  modified_base 32: mod_base = OTHER; note = 2'-O-methyl modified nucleotide
  modified_base 33: mod_base = OTHER; note = 2'-O-methyl modified nucleotide
  modified_base 34: mod_base = OTHER; note = 2'-O-methyl modified nucleotide
  modified_base 35: mod_base = OTHER; note = 2'-O-methyl modified nucleotide
  modified_base 36: mod_base = OTHER; note = 2'-O-methyl modified nucleotide
  modified_base 37: mod_base = OTHER; note = 2'-O-methyl modified nucleotide
  modified_base 38: mod_base = OTHER; note = 2'-O-methyl modified nucleotide
  modified_base 39: mod_base = OTHER; note = 2'-O-methyl modified nucleotide
  modified_base 40: mod_base = OTHER; note = 2'-O-methyl modified nucleotide
  modified_base 69: mod_base = OTHER; note = 2'-O-methyl modified nucleotide
  modified_base 70: mod_base = OTHER; note = 2'-O-methyl modified nucleotide
  modified_base 71: mod_base = OTHER; note = 2'-O-methyl modified nucleotide
  modified_base 72: mod_base = OTHER; note = 2'-O-methyl modified nucleotide
  modified_base 73: mod_base = OTHER; note = 2'-O-methyl modified nucleotide
  modified_base 74: mod_base = OTHER; note = 2'-O-methyl modified nucleotide
  modified_base 75: mod_base = OTHER; note = 2'-O-methyl modified nucleotide
  modified_base 76: mod_base = OTHER; note = 2'-O-methyl modified nucleotide
  modified_base 77: mod_base = OTHER; note = 2'-O-methyl modified nucleotide
  modified_base 78: mod_base = OTHER; note = 2'-O-methyl modified nucleotide
  modified_base 79: mod_base = OTHER; note = 2'-O-methyl modified nucleotide
  modified_base 80: mod_base = OTHER; note = 2'-O-methyl modified nucleotide
  modified_base 81: mod_base = OTHER; note = 2'-O-methyl modified nucleotide
  modified_base 82: mod_base = OTHER; note = 2'-O-methyl modified nucleotide
  modified_base 83: mod_base = OTHER; note = 2'-O-methyl modified nucleotide
  modified_base 84: mod_base = OTHER; note = 2'-O-methyl modified nucleotide
  modified_base 85: mod_base = OTHER; note = 2'-O-methyl modified nucleotide
  modified_base 86: mod_base = OTHER; note = 2'-O-methyl modified nucleotide
  modified_base 87: mod_base = OTHER; note = 2'-O-methyl modified nucleotide
  modified_base 88: mod_base = OTHER; note = 2'-O-methyl modified nucleotide
  modified_base 89: mod_base = OTHER; note = 2'-O-methyl modified nucleotide
  modified_base 90: mod_base = OTHER; note = 2'-O-methyl modified nucleotide
  modified_base 91: mod_base = OTHER; note = 2'-O-methyl modified nucleotide
  modified_base 92: mod_base = OTHER; note = 2'-O-methyl modified nucleotide
  modified_base 93: mod_base = OTHER; note = 2'-O-methyl modified nucleotide
  modified_base 94: mod_base = OTHER; note = 2'-O-methyl modified nucleotide
  modified_base 95: mod_base = OTHER; note = 2'-O-methyl modified nucleotide
  modified_base 96: mod_base = OTHER; note = 2'-O-methyl modified nucleotide
  modified_base 118: mod_base = OTHER; note = Nucleotide with phosphorothioate linkage
  modified_base 119: mod_base = OTHER; note = 2'-O-methyl modified nucleotide with phosphorothioate linkage
  modified_base 120: mod_base = OTHER; note = 2'-O-methyl modified nucleotide with phosphorothioate linkage
  modified_base 121: mod_base = OTHER; note = 2'-O-methyl modified nucleotide
gagtagcgcgagcacagctagttttagagctagaaatagcaagttaaaataaggctagtccgttatcaacttgaaaaagtggcaccgagtcggtgctggccttagtaacctgtgctcgcgc

SEQ ID NO: 17741 - RNA, 120 nt, synthetic construct
  source 1..120: mol_type = other RNA
  modified_base 1: mod_base = OTHER; note = 2'-O-methyl modified nucleotide with phosphorothioate linkage
  modified_base 2: mod_base = OTHER; note = 2'-O-methyl modified nucleotide with phosphorothioate linkage
  modified_base 3: mod_base = OTHER; note = 2'-O-methyl modified nucleotide with phosphorothioate linkage
  modified_base 29: mod_base = OTHER; note = 2'-O-methyl modified nucleotide
  modified_base 30: mod_base = OTHER; note = 2'-O-methyl modified nucleotide
  modified_base 31: mod_base = OTHER; note = 2'-O-methyl modified nucleotide
  modified_base 32: mod_base = OTHER; note = 2'-O-methyl modified nucleotide
  modified_base 33: mod_base = OTHER; note = 2'-O-methyl modified nucleotide
  modified_base 34: mod_base = OTHER; note = 2'-O-methyl modified nucleotide
  modified_base 35: mod_base = OTHER; note = 2'-O-methyl modified nucleotide
  modified_base 36: mod_base = OTHER; note = 2'-O-methyl modified nucleotide
  modified_base 37: mod_base = OTHER; note = 2'-O-methyl modified nucleotide
  modified_base 38: mod_base = OTHER; note = 2'-O-methyl modified nucleotide
  modified_base 39: mod_base = OTHER; note = 2'-O-methyl modified nucleotide
  modified_base 40: mod_base = OTHER; note = 2'-O-methyl modified nucleotide
  modified_base 69: mod_base = OTHER; note = 2'-O-methyl modified nucleotide
  modified_base 70: mod_base = OTHER; note = 2'-O-methyl modified nucleotide
  modified_base 71: mod_base = OTHER; note = 2'-O-methyl modified nucleotide
  modified_base 72: mod_base = OTHER; note = 2'-O-methyl modified nucleotide
  modified_base 73: mod_base = OTHER; note = 2'-O-methyl modified nucleotide
  modified_base 74: mod_base = OTHER; note = 2'-O-methyl modified nucleotide
  modified_base 75: mod_base = OTHER; note = 2'-O-methyl modified nucleotide
  modified_base 76: mod_base = OTHER; note = 2'-O-methyl modified nucleotide
  modified_base 77: mod_base = OTHER; note = 2'-O-methyl modified nucleotide
  modified_base 78: mod_base = OTHER; note = 2'-O-methyl modified nucleotide
  modified_base 79: mod_base = OTHER; note = 2'-O-methyl modified nucleotide
  modified_base 80: mod_base = OTHER; note = 2'-O-methyl modified nucleotide
  modified_base 81: mod_base = OTHER; note = 2'-O-methyl modified nucleotide
  modified_base 82: mod_base = OTHER; note = 2'-O-methyl modified nucleotide
  modified_base 83: mod_base = OTHER; note = 2'-O-methyl modified nucleotide
  modified_base 84: mod_base = OTHER; note = 2'-O-methyl modified nucleotide
  modified_base 85: mod_base = OTHER; note = 2'-O-methyl modified nucleotide
  modified_base 86: mod_base = OTHER; note = 2'-O-methyl modified nucleotide
  modified_base 87: mod_base = OTHER; note = 2'-O-methyl modified nucleotide
  modified_base 88: mod_base = OTHER; note = 2'-O-methyl modified nucleotide
  modified_base 89: mod_base = OTHER; note = 2'-O-methyl modified nucleotide
  modified_base 90: mod_base = OTHER; note = 2'-O-methyl modified nucleotide
  modified_base 91: mod_base = OTHER; note = 2'-O-methyl modified nucleotide
  modified_base 92: mod_base = OTHER; note = 2'-O-methyl modified nucleotide
  modified_base 93: mod_base = OTHER; note = 2'-O-methyl modified nucleotide
  modified_base 94: mod_base = OTHER; note = 2'-O-methyl modified nucleotide
  modified_base 95: mod_base = OTHER; note = 2'-O-methyl modified nucleotide
  modified_base 96: mod_base = OTHER; note = 2'-O-methyl modified nucleotide
  modified_base 117: mod_base = OTHER; note = Nucleotide with phosphorothioate linkage
  modified_base 118: mod_base = OTHER; note = 2'-O-methyl modified nucleotide with phosphorothioate linkage
  modified_base 119: mod_base = OTHER; note = 2'-O-methyl modified nucleotide with phosphorothioate linkage
  modified_base 120: mod_base = OTHER; note = 2'-O-methyl modified nucleotide
gagtagcgcgagcacagctagttttagagctagaaatagcaagttaaaataaggctagtccgttatcaacttgaaaaagtggcaccgagtcggtgctggccttagtaacctgtgctcgcg

SEQ ID NO: 17742 - RNA, 119 nt, synthetic construct
  source 1..119: mol_type = other RNA
  modified_base 1: mod_base = OTHER; note = 2'-O-methyl modified nucleotide with phosphorothioate linkage
  modified_base 2: mod_base = OTHER; note = 2'-O-methyl modified nucleotide with phosphorothioate linkage
  modified_base 3: mod_base = OTHER; note = 2'-O-methyl modified nucleotide with phosphorothioate linkage
  modified_base 29: mod_base = OTHER; note = 2'-O-methyl modified nucleotide
  modified_base 30: mod_base = OTHER; note = 2'-O-methyl modified nucleotide
  modified_base 31: mod_base = OTHER; note = 2'-O-methyl modified nucleotide
  modified_base 32: mod_base = OTHER; note = 2'-O-methyl modified nucleotide
  modified_base 33: mod_base = OTHER; note = 2'-O-methyl modified nucleotide
  modified_base 34: mod_base = OTHER; note = 2'-O-methyl modified nucleotide
  modified_base 35: mod_base = OTHER; note = 2'-O-methyl modified nucleotide
  modified_base 36: mod_base = OTHER; note = 2'-O-methyl modified nucleotide
  modified_base 37: mod_base = OTHER; note = 2'-O-methyl modified nucleotide
  modified_base 38: mod_base = OTHER; note = 2'-O-methyl modified nucleotide
  modified_base 39: mod_base = OTHER; note = 2'-O-methyl modified nucleotide
  modified_base 40: mod_base = OTHER; note = 2'-O-methyl modified nucleotide
  modified_base 69: mod_base = OTHER; note = 2'-O-methyl modified nucleotide
  modified_base 70: mod_base = OTHER; note = 2'-O-methyl modified nucleotide
  modified_base 71: mod_base = OTHER; note = 2'-O-methyl modified nucleotide
  modified_base 72: mod_base = OTHER; note = 2'-O-methyl modified nucleotide
  modified_base 73: mod_base = OTHER; note = 2'-O-methyl modified nucleotide
  modified_base 74: mod_base = OTHER; note = 2'-O-methyl modified nucleotide
  modified_base 75: mod_base = OTHER; note = 2'-O-methyl modified nucleotide
  modified_base 76: mod_base = OTHER; note = 2'-O-methyl modified nucleotide
  modified_base 77: mod_base = OTHER; note = 2'-O-methyl modified nucleotide
  modified_base 78: mod_base = OTHER; note = 2'-O-methyl modified nucleotide
  modified_base 79: mod_base = OTHER; note = 2'-O-methyl modified nucleotide
  modified_base 80: mod_base = OTHER; note = 2'-O-methyl modified nucleotide
  modified_base 81: mod_base = OTHER; note = 2'-O-methyl modified nucleotide
  modified_base 82: mod_base = OTHER; note = 2'-O-methyl modified nucleotide
  modified_base 83: mod_base = OTHER; note = 2'-O-methyl modified nucleotide
  modified_base 84: mod_base = OTHER; note = 2'-O-methyl modified nucleotide
  modified_base 85: mod_base = OTHER; note = 2'-O-methyl modified nucleotide
  modified_base 86: mod_base = OTHER; note = 2'-O-methyl modified nucleotide
  modified_base 87: mod_base = OTHER; note = 2'-O-methyl modified nucleotide
  modified_base 88: mod_base = OTHER; note = 2'-O-methyl modified nucleotide
  modified_base 89: mod_base = OTHER; note = 2'-O-methyl modified nucleotide
  modified_base 90: mod_base = OTHER; note = 2'-O-methyl modified nucleotide
  modified_base 91: mod_base = OTHER; note = 2'-O-methyl modified nucleotide
  modified_base 92: mod_base = OTHER; note = 2'-O-methyl modified nucleotide
  modified_base 93: mod_base = OTHER; note = 2'-O-methyl modified nucleotide
  modified_base 94: mod_base = OTHER; note = 2'-O-methyl modified nucleotide
  modified_base 95: mod_base = OTHER; note = 2'-O-methyl modified nucleotide
  modified_base 96: mod_base = OTHER; note = 2'-O-methyl modified nucleotide
  modified_base 116: mod_base = OTHER; note = Nucleotide with phosphorothioate linkage
  modified_base 117: mod_base = OTHER; note = 2'-O-methyl modified nucleotide with phosphorothioate linkage
  modified_base 118: mod_base = OTHER; note = 2'-O-methyl modified nucleotide with phosphorothioate linkage
  modified_base 119: mod_base = OTHER; note = 2'-O-methyl modified nucleotide
gagtagcgcgagcacagctagttttagagctagaaatagcaagttaaaataaggctagtccgttatcaacttgaaaaagtggcaccgagtcggtgctggccttagtaacctgtgctcgc

SEQ ID NO: 17743 - RNA, 118 nt, synthetic construct
  source 1..118: mol_type = other RNA
  modified_base 1: mod_base = OTHER; note = 2'-O-methyl modified nucleotide with phosphorothioate linkage
  modified_base 2: mod_base = OTHER; note = 2'-O-methyl modified nucleotide with phosphorothioate linkage
  modified_base 3: mod_base = OTHER; note = 2'-O-methyl modified nucleotide with phosphorothioate linkage
  modified_base 29: mod_base = OTHER; note = 2'-O-methyl modified nucleotide
  modified_base 30: mod_base = OTHER; note = 2'-O-methyl modified nucleotide
  modified_base 31: mod_base = OTHER; note = 2'-O-methyl modified nucleotide
  modified_base 32: mod_base = OTHER; note = 2'-O-methyl modified nucleotide
  modified_base 33: mod_base = OTHER; note = 2'-O-methyl modified nucleotide
  modified_base 34: mod_base = OTHER; note = 2'-O-methyl modified nucleotide
  modified_base 35: mod_base = OTHER; note = 2'-O-methyl modified nucleotide
  modified_base 36: mod_base = OTHER; note = 2'-O-methyl modified nucleotide
  modified_base 37: mod_base = OTHER; note = 2'-O-methyl modified nucleotide
  modified_base 38: mod_base = OTHER; note = 2'-O-methyl modified nucleotide
  modified_base 39: mod_base = OTHER; note = 2'-O-methyl modified nucleotide
  modified_base 40: mod_base = OTHER; note = 2'-O-methyl modified nucleotide
  modified_base 69: mod_base = OTHER; note = 2'-O-methyl modified nucleotide
  modified_base 70: mod_base = OTHER; note = 2'-O-methyl modified nucleotide
  modified_base 71: mod_base = OTHER; note = 2'-O-methyl modified nucleotide
  modified_base 72: mod_base = OTHER; note = 2'-O-methyl modified nucleotide
  modified_base 73: mod_base = OTHER; note = 2'-O-methyl modified nucleotide
  modified_base 74: mod_base = OTHER; note = 2'-O-methyl modified nucleotide
  modified_base 75: mod_base = OTHER; note = 2'-O-methyl modified nucleotide
  modified_base 76: mod_base = OTHER; note = 2'-O-methyl modified nucleotide
  modified_base 77: mod_base = OTHER; note = 2'-O-methyl modified nucleotide
  modified_base 78: mod_base = OTHER; note = 2'-O-methyl modified nucleotide
  modified_base 79: mod_base = OTHER; note = 2'-O-methyl modified nucleotide
  modified_base 80: mod_base = OTHER; note = 2'-O-methyl modified nucleotide
  modified_base 81: mod_base = OTHER; note = 2'-O-methyl modified nucleotide
  modified_base 82: mod_base = OTHER; note = 2'-O-methyl modified nucleotide
  modified_base 83: mod_base = OTHER; note = 2'-O-methyl modified nucleotide
  modified_base 84: mod_base = OTHER; note = 2'-O-methyl modified nucleotide
  modified_base 85: mod_base = OTHER; note = 2'-O-methyl modified nucleotide
  modified_base 86: mod_base = OTHER; note = 2'-O-methyl modified nucleotide
  modified_base 87: mod_base = OTHER; note = 2'-O-methyl modified nucleotide
  modified_base 88: mod_base = OTHER; note = 2'-O-methyl modified nucleotide
  modified_base 89: mod_base = OTHER; note = 2'-O-methyl modified nucleotide
  modified_base 90: mod_base = OTHER; note = 2'-O-methyl modified nucleotide
  modified_base 91: mod_base = OTHER; note = 2'-O-methyl modified nucleotide
  modified_base 92: mod_base = OTHER; note = 2'-O-methyl modified nucleotide
  modified_base 93: mod_base = OTHER; note = 2'-O-methyl modified nucleotide
  modified_base 94: mod_base = OTHER; note = 2'-O-methyl modified nucleotide
  modified_base 95: mod_base = OTHER; note = 2'-O-methyl modified nucleotide
  modified_base 96: mod_base = OTHER; note = 2'-O-methyl modified nucleotide
  modified_base 115: mod_base = OTHER; note = Nucleotide with phosphorothioate linkage
  modified_base 116: mod_base = OTHER; note = 2'-O-methyl modified nucleotide with phosphorothioate linkage
  modified_base 117: mod_base = OTHER; note = 2'-O-methyl modified nucleotide with phosphorothioate linkage
  modified_base 118: mod_base = OTHER; note = 2'-O-methyl modified nucleotide
gagtagcgcgagcacagctagttttagagctagaaatagcaagttaaaataaggctagtccgttatcaacttgaaaaagtggcaccgagtcggtgctggccttagtaacctgtgctcg

SEQ ID NO: 17744 - RNA, 117 nt, synthetic construct
  source 1..117: mol_type = other RNA
  modified_base 1: mod_base = OTHER; note = 2'-O-methyl modified nucleotide with phosphorothioate linkage
  modified_base 2: mod_base = OTHER; note = 2'-O-methyl modified nucleotide with phosphorothioate linkage
  modified_base 3: mod_base = OTHER; note = 2'-O-methyl modified nucleotide with phosphorothioate linkage
  modified_base 29: mod_base = OTHER; note = 2'-O-methyl modified nucleotide
  modified_base 30: mod_base = OTHER; note = 2'-O-methyl modified nucleotide
  modified_base 31: mod_base = OTHER; note = 2'-O-methyl modified nucleotide
  modified_base 32: mod_base = OTHER; note = 2'-O-methyl modified nucleotide
  modified_base 33: mod_base = OTHER; note = 2'-O-methyl modified nucleotide
  modified_base 34: mod_base = OTHER; note = 2'-O-methyl modified nucleotide
  modified_base 35: mod_base = OTHER; note = 2'-O-methyl modified nucleotide
  modified_base 36: mod_base = OTHER; note = 2'-O-methyl modified nucleotide
  modified_base 37: mod_base = OTHER; note = 2'-O-methyl modified nucleotide
  modified_base 38: mod_base = OTHER; note = 2'-O-methyl modified nucleotide
  modified_base 39: mod_base = OTHER; note = 2'-O-methyl modified nucleotide
  modified_base 40: mod_base = OTHER; note = 2'-O-methyl modified nucleotide
  modified_base 69: mod_base = OTHER; note = 2'-O-methyl modified nucleotide
  modified_base 70: mod_base = OTHER; note = 2'-O-methyl modified nucleotide
  modified_base 71: mod_base = OTHER; note = 2'-O-methyl modified nucleotide
  modified_base 72: mod_base = OTHER; note = 2'-O-methyl modified nucleotide
  modified_base 73: mod_base = OTHER; note = 2'-O-methyl modified nucleotide
  modified_base 74: mod_base = OTHER; note = 2'-O-methyl modified nucleotide
  modified_base 75: mod_base = OTHER; note = 2'-O-methyl modified nucleotide
  modified_base 76: mod_base = OTHER; note = 2'-O-methyl modified nucleotide
  modified_base 77: mod_base = OTHER; note = 2'-O-methyl modified nucleotide
  modified_base 78: mod_base = OTHER; note = 2'-O-methyl modified nucleotide
  modified_base 79: mod_base = OTHER; note = 2'-O-methyl modified nucleotide
  modified_base 80: mod_base = OTHER; note = 2'-O-methyl modified nucleotide
  modified_base 81: mod_base = OTHER; note = 2'-O-methyl modified nucleotide
  modified_base 82: mod_base = OTHER; note = 2'-O-methyl modified nucleotide
  modified_base 83: mod_base = OTHER; note = 2'-O-methyl modified nucleotide
  modified_base 84: mod_base = OTHER; note = 2'-O-methyl modified nucleotide
  modified_base 85: mod_base = OTHER; note = 2'-O-methyl modified nucleotide
  modified_base 86: mod_base = OTHER; note = 2'-O-methyl modified nucleotide
  modified_base 87: mod_base = OTHER; note = 2'-O-methyl modified nucleotide
  modified_base 88: mod_base = OTHER; note = 2'-O-methyl modified nucleotide
  modified_base 89: mod_base = OTHER; note = 2'-O-methyl modified nucleotide
  modified_base 90: mod_base = OTHER; note = 2'-O-methyl modified nucleotide
  modified_base 91: mod_base = OTHER; note = 2'-O-methyl modified nucleotide
  modified_base 92: mod_base = OTHER; note = 2'-O-methyl modified nucleotide
  modified_base 93: mod_base = OTHER; note = 2'-O-methyl modified nucleotide
  modified_base 94: mod_base = OTHER; note = 2'-O-methyl modified nucleotide
  modified_base 95: mod_base = OTHER; note = 2'-O-methyl modified nucleotide
  modified_base 96: mod_base = OTHER; note = 2'-O-methyl modified nucleotide
  modified_base 114: mod_base = OTHER; note = Nucleotide with phosphorothioate linkage
  modified_base 115: mod_base = OTHER; note = 2'-O-methyl modified nucleotide with phosphorothioate linkage
  modified_base 116: mod_base = OTHER; note = 2'-O-methyl modified nucleotide with phosphorothioate linkage
  modified_base 117: mod_base = OTHER; note = 2'-O-methyl modified nucleotide
gagtagcgcgagcacagctagttttagagctagaaatagcaagttaaaataaggctagtccgttatcaacttgaaaaagtggcaccgagtcggtgctggccttagtaacctgtgctc

SEQ ID NO: 17745 - RNA, 124 nt, synthetic construct
  source 1..124: mol_type = other RNA
  modified_base 1: mod_base = OTHER; note = 2'-O-methyl modified nucleotide with phosphorothioate linkage
  modified_base 2: mod_base = OTHER; note = 2'-O-methyl modified nucleotide with phosphorothioate linkage
  modified_base 3: mod_base = OTHER; note = 2'-O-methyl modified nucleotide with phosphorothioate linkage
  modified_base 29: mod_base = OTHER; note = 2'-O-methyl modified nucleotide
  modified_base 30: mod_base = OTHER; note = 2'-O-methyl modified nucleotide
  modified_base 31: mod_base = OTHER; note = 2'-O-methyl modified nucleotide
  modified_base 32: mod_base = OTHER; note = 2'-O-methyl modified nucleotide
  modified_base 33: mod_base = OTHER; note = 2'-O-methyl modified nucleotide
  modified_base 34: mod_base = OTHER; note = 2'-O-methyl modified nucleotide
  modified_base 35: mod_base = OTHER; note = 2'-O-methyl modified nucleotide
  modified_base 36: mod_base = OTHER; note = 2'-O-methyl modified nucleotide
  modified_base 37: mod_base = OTHER; note = 2'-O-methyl modified nucleotide
  modified_base 38: mod_base = OTHER; note = 2'-O-methyl modified nucleotide
  modified_base 39: mod_base = OTHER; note = 2'-O-methyl modified nucleotide
  modified_base 40: mod_base = OTHER; note = 2'-O-methyl modified nucleotide
  modified_base 69: mod_base = OTHER; note = 2'-O-methyl modified nucleotide
  modified_base 70: mod_base = OTHER; note = 2'-O-methyl modified nucleotide
  modified_base 71: mod_base = OTHER; note = 2'-O-methyl modified nucleotide
  modified_base 72: mod_base = OTHER; note = 2'-O-methyl modified nucleotide
  modified_base 73: mod_base = OTHER; note = 2'-O-methyl modified nucleotide
  modified_base 74: mod_base = OTHER; note = 2'-O-methyl modified nucleotide
  modified_base 75: mod_base = OTHER; note = 2'-O-methyl modified nucleotide
  modified_base 76: mod_base = OTHER; note = 2'-O-methyl modified nucleotide
  modified_base 77: mod_base = OTHER; note = 2'-O-methyl modified nucleotide
  modified_base 78: mod_base = OTHER; note = 2'-O-methyl modified nucleotide
  modified_base 79: mod_base = OTHER; note = 2'-O-methyl modified nucleotide
  modified_base 80: mod_base = OTHER; note = 2'-O-methyl modified nucleotide
  modified_base 81: mod_base = OTHER; note = 2'-O-methyl modified nucleotide
  modified_base 82: mod_base = OTHER; note = 2'-O-methyl modified nucleotide
  modified_base 83: mod_base = OTHER; note = 2'-O-methyl modified nucleotide
  modified_base 84: mod_base = OTHER; note = 2'-O-methyl modified nucleotide
  modified_base 85: mod_base = OTHER; note = 2'-O-methyl modified nucleotide
  modified_base 86: mod_base = OTHER; note = 2'-O-methyl modified nucleotide
  modified_base 87: mod_base = OTHER; note = 2'-O-methyl modified nucleotide
  modified_base 88: mod_base = OTHER; note = 2'-O-methyl modified nucleotide
  modified_base 89: mod_base = OTHER; note = 2'-O-methyl modified nucleotide
  modified_base 90: mod_base = OTHER; note = 2'-O-methyl modified nucleotide
  modified_base 91: mod_base = OTHER; note = 2'-O-methyl modified nucleotide
  modified_base 92: mod_base = OTHER; note = 2'-O-methyl modified nucleotide
  modified_base 93: mod_base = OTHER; note = 2'-O-methyl modified nucleotide
  modified_base 94: mod_base = OTHER; note = 2'-O-methyl modified nucleotide
  modified_base 95: mod_base = OTHER; note = 2'-O-methyl modified nucleotide
  modified_base 96: mod_base = OTHER; note = 2'-O-methyl modified nucleotide
  modified_base 121: mod_base = OTHER; note = Nucleotide with phosphorothioate linkage
  modified_base 122: mod_base = OTHER; note = 2'-O-methyl modified nucleotide with phosphorothioate linkage
  modified_base 123: mod_base = OTHER; note = 2'-O-methyl modified nucleotide with phosphorothioate linkage
  modified_base 124: mod_base = OTHER; note = 2'-O-methyl modified nucleotide
gagtagcgcgagcacagctagttttagagctagaaatagcaagttaaaataaggctagtccgttatcaacttgaaaaagtggcaccgagtcggtgccgtggccttagtaacctgtgctcgcgct

SEQ ID NO: 17746 - RNA, 123 nt, synthetic construct
  source 1..123: mol_type = other RNA
  modified_base 1: mod_base = OTHER; note = 2'-O-methyl modified nucleotide with phosphorothioate linkage
  modified_base 2: mod_base = OTHER; note = 2'-O-methyl modified nucleotide with phosphorothioate linkage
  modified_base 3: mod_base = OTHER; note = 2'-O-methyl modified nucleotide with phosphorothioate linkage
  modified_base 29: mod_base = OTHER; note = 2'-O-methyl modified nucleotide
  modified_base 30: mod_base = OTHER; note = 2'-O-methyl modified nucleotide
  modified_base 31: mod_base = OTHER; note = 2'-O-methyl modified nucleotide
  modified_base 32: mod_base = OTHER; note = 2'-O-methyl modified nucleotide
  modified_base 33: mod_base = OTHER; note = 2'-O-methyl modified nucleotide
  modified_base 34: mod_base = OTHER; note = 2'-O-methyl modified nucleotide
  modified_base 35: mod_base = OTHER; note = 2'-O-methyl modified nucleotide
  modified_base 36: mod_base = OTHER; note = 2'-O-methyl modified nucleotide
  modified_base 37: mod_base = OTHER; note = 2'-O-methyl modified nucleotide
  modified_base 38: mod_base = OTHER; note = 2'-O-methyl modified nucleotide
  modified_base 39: mod_base = OTHER; note = 2'-O-methyl modified nucleotide
  modified_base 40: mod_base = OTHER; note = 2'-O-methyl modified nucleotide
  modified_base 69: mod_base = OTHER; note = 2'-O-methyl modified nucleotide
  modified_base 70: mod_base = OTHER; note = 2'-O-methyl modified nucleotide
  modified_base 71: mod_base = OTHER; note = 2'-O-methyl modified nucleotide
  modified_base 72: mod_base = OTHER; note = 2'-O-methyl modified nucleotide
  modified_base 73: mod_base = OTHER; note = 2'-O-methyl modified nucleotide
  modified_base 74: mod_base = OTHER; note = 2'-O-methyl modified nucleotide
  modified_base 75: mod_base = OTHER; note = 2'-O-methyl modified nucleotide
  modified_base 76: mod_base = OTHER; note = 2'-O-methyl modified nucleotide
  modified_base 77: mod_base = OTHER; note = 2'-O-methyl modified nucleotide
  modified_base 78: mod_base = OTHER; note = 2'-O-methyl modified nucleotide
  modified_base 79: mod_base = OTHER; note = 2'-O-methyl modified nucleotide
  modified_base 80: mod_base = OTHER; note = 2'-O-methyl modified nucleotide
  modified_base 81: mod_base = OTHER; note = 2'-O-methyl modified nucleotide
  modified_base 82: mod_base = OTHER; note = 2'-O-methyl modified nucleotide
  modified_base 83: mod_base = OTHER; note = 2'-O-methyl modified nucleotide
  modified_base 84: mod_base = OTHER; note = 2'-O-methyl modified nucleotide
  modified_base 85: mod_base = OTHER; note = 2'-O-methyl modified nucleotide
  modified_base 86: mod_base = OTHER; note = 2'-O-methyl modified nucleotide
  modified_base 87: mod_base = OTHER; note = 2'-O-methyl modified nucleotide
  modified_base 88: mod_base = OTHER; note = 2'-O-methyl modified nucleotide
  modified_base 89: mod_base = OTHER; note = 2'-O-methyl modified nucleotide
  modified_base 90: mod_base = OTHER; note = 2'-O-methyl modified nucleotide
  modified_base 91: mod_base = OTHER; note = 2'-O-methyl modified nucleotide
  modified_base 92: mod_base = OTHER; note = 2'-O-methyl modified nucleotide
  modified_base 93: mod_base = OTHER; note = 2'-O-methyl modified nucleotide
  modified_base 94: mod_base = OTHER; note = 2'-O-methyl modified nucleotide
  modified_base 95: mod_base = OTHER; note = 2'-O-methyl modified nucleotide
  modified_base 96: mod_base = OTHER; note = 2'-O-methyl modified nucleotide
  modified_base 120: mod_base = OTHER; note = Nucleotide with phosphorothioate linkage
  modified_base 121: mod_base = OTHER; note = 2'-O-methyl modified nucleotide with phosphorothioate linkage
  modified_base 122: mod_base = OTHER; note = 2'-O-methyl modified nucleotide with phosphorothioate linkage
  modified_base 123: mod_base = OTHER; note = 2'-O-methyl modified nucleotide
gagtagcgcgagcacagctagttttagagctagaaatagcaagttaaaataaggctagtccgttatcaacttgaaaaagtggcaccgagtcggtgccgtggccttagtaacctgtgctcgcgc

SEQ ID NO: 17747 - RNA, 122 nt, synthetic construct
  source 1..122: mol_type = other RNA
  modified_base 1: mod_base = OTHER; note = 2'-O-methyl modified nucleotide with phosphorothioate linkage
  modified_base 2: mod_base = OTHER; note = 2'-O-methyl modified nucleotide with phosphorothioate linkage
  modified_base 3: mod_base = OTHER; note = 2'-O-methyl modified nucleotide with phosphorothioate linkage
  modified_base 29: mod_base = OTHER; note = 2'-O-methyl modified nucleotide
  modified_base 30: mod_base = OTHER; note = 2'-O-methyl modified nucleotide
  modified_base 31: mod_base = OTHER; note = 2'-O-methyl modified nucleotide
  modified_base 32: mod_base = OTHER; note = 2'-O-methyl modified nucleotide
  modified_base 33: mod_base = OTHER; note = 2'-O-methyl modified nucleotide
  modified_base 34: mod_base = OTHER; note = 2'-O-methyl modified nucleotide
  modified_base 35: mod_base = OTHER; note = 2'-O-methyl modified nucleotide
  modified_base 36: mod_base = OTHER; note = 2'-O-methyl modified nucleotide
  modified_base 37: mod_base = OTHER; note = 2'-O-methyl modified nucleotide
  modified_base 38: mod_base = OTHER; note = 2'-O-methyl modified nucleotide
  modified_base 39: mod_base = OTHER; note = 2'-O-methyl modified nucleotide
  modified_base 40: mod_base = OTHER; note = 2'-O-methyl modified nucleotide
  modified_base 69: mod_base = OTHER; note = 2'-O-methyl modified nucleotide
  modified_base 70: mod_base = OTHER; note = 2'-O-methyl modified nucleotide
  modified_base 71: mod_base = OTHER; note = 2'-O-methyl modified nucleotide
  modified_base 72: mod_base = OTHER; note = 2'-O-methyl modified nucleotide
  modified_base 73: mod_base = OTHER; note = 2'-O-methyl modified nucleotide
  modified_base 74: mod_base = OTHER; note = 2'-O-methyl modified nucleotide
  modified_base 75: mod_base = OTHER; note = 2'-O-methyl modified nucleotide
  modified_base 76: mod_base = OTHER; note = 2'-O-methyl modified nucleotide
  modified_base 77: mod_base = OTHER; note = 2'-O-methyl modified nucleotide
  modified_base 78: mod_base = OTHER; note = 2'-O-methyl modified nucleotide
  modified_base 79: mod_base = OTHER; note = 2'-O-methyl modified nucleotide
  modified_base 80: mod_base = OTHER; note = 2'-O-methyl modified nucleotide
  modified_base 81: mod_base = OTHER; note = 2'-O-methyl modified nucleotide
  modified_base 82: mod_base = OTHER; note = 2'-O-methyl modified nucleotide
  modified_base 83: mod_base = OTHER; note = 2'-O-methyl modified nucleotide
  modified_base 84: mod_base = OTHER; note = 2'-O-methyl modified nucleotide
  modified_base 85: mod_base = OTHER; note = 2'-O-methyl modified nucleotide
  modified_base 86: mod_base = OTHER; note = 2'-O-methyl modified nucleotide
  modified_base 87: mod_base = OTHER; note = 2'-O-methyl modified nucleotide
  modified_base 88: mod_base = OTHER; note = 2'-O-methyl modified nucleotide
  modified_base 89: mod_base = OTHER; note = 2'-O-methyl modified nucleotide
  modified_base 90: mod_base = OTHER; note = 2'-O-methyl modified nucleotide
  modified_base 91: mod_base = OTHER; note = 2'-O-methyl modified nucleotide
  modified_base 92: mod_base = OTHER; note = 2'-O-methyl modified nucleotide
  modified_base 93: mod_base = OTHER; note = 2'-O-methyl modified nucleotide
  modified_base 94: mod_base = OTHER; note = 2'-O-methyl modified nucleotide
  modified_base 95: mod_base = OTHER; note = 2'-O-methyl modified nucleotide
  modified_base 96: mod_base = OTHER; note = 2'-O-methyl modified nucleotide
  modified_base 119: mod_base = OTHER; note = Nucleotide with phosphorothioate linkage
  modified_base 120: mod_base = OTHER; note = 2'-O-methyl modified nucleotide with phosphorothioate linkage
  modified_base 121: mod_base = OTHER; note = 2'-O-methyl modified nucleotide with phosphorothioate linkage
  modified_base 122: mod_base = OTHER; note = 2'-O-methyl modified nucleotide
gagtagcgcgagcacagctagttttagagctagaaatagcaagttaaaataaggctagtccgttatcaacttgaaaaagtggcaccgagtcggtgccgtggccttagtaacctgtgctcgcg

SEQ ID NO: 17748 - RNA, 121 nt, synthetic construct
  source 1..121: mol_type = other RNA
  modified_base 1: mod_base = OTHER; note = 2'-O-methyl modified nucleotide with phosphorothioate linkage
  modified_base 2: mod_base = OTHER; note = 2'-O-methyl modified nucleotide with phosphorothioate linkage
  modified_base 3: mod_base = OTHER; note = 2'-O-methyl modified nucleotide with phosphorothioate linkage
  modified_base 29: mod_base = OTHER; note = 2'-O-methyl modified nucleotide
  modified_base 30: mod_base = OTHER; note = 2'-O-methyl modified nucleotide
  modified_base 31: mod_base = OTHER; note = 2'-O-methyl modified nucleotide
  modified_base 32: mod_base = OTHER; note = 2'-O-methyl modified nucleotide
  modified_base 33: mod_base = OTHER; note = 2'-O-methyl modified nucleotide
  modified_base 34: mod_base = OTHER; note = 2'-O-methyl modified nucleotide
  modified_base 35: mod_base = OTHER; note = 2'-O-methyl modified nucleotide
  modified_base 36: mod_base = OTHER; note = 2'-O-methyl modified nucleotide
  modified_base 37: mod_base = OTHER; note = 2'-O-methyl modified nucleotide
  modified_base 38: mod_base = OTHER; note = 2'-O-methyl modified nucleotide
  modified_base 39: mod_base = OTHER; note = 2'-O-methyl modified nucleotide
  modified_base 40: mod_base = OTHER; note = 2'-O-methyl modified nucleotide
  modified_base 69: mod_base = OTHER; note = 2'-O-methyl modified nucleotide
  modified_base 70: mod_base = OTHER; note = 2'-O-methyl modified nucleotide
  modified_base 71: mod_base = OTHER; note = 2'-O-methyl modified nucleotide
  modified_base 72: mod_base = OTHER; note = 2'-O-methyl modified nucleotide
  modified_base 73: mod_base = OTHER; note = 2'-O-methyl modified nucleotide
  modified_base 74: mod_base = OTHER; note = 2'-O-methyl modified nucleotide
  modified_base 75: mod_base = OTHER; note = 2'-O-methyl modified nucleotide
  modified_base 76: mod_base = OTHER; note = 2'-O-methyl modified nucleotide
  modified_base 77: mod_base = OTHER; note = 2'-O-methyl modified nucleotide
  modified_base 78: mod_base = OTHER; note = 2'-O-methyl modified nucleotide
  modified_base 79: mod_base = OTHER; note = 2'-O-methyl modified nucleotide
  modified_base 80: mod_base = OTHER; note = 2'-O-methyl modified nucleotide
  modified_base 81: mod_base = OTHER; note = 2'-O-methyl modified nucleotide
  modified_base 82: mod_base = OTHER; note = 2'-O-methyl modified nucleotide
  modified_base 83: mod_base = OTHER; note = 2'-O-methyl modified nucleotide
  modified_base 84: mod_base = OTHER; note = 2'-O-methyl modified nucleotide
  modified_base 85: mod_base = OTHER; note = 2'-O-methyl modified nucleotide
  modified_base 86: mod_base = OTHER; note = 2'-O-methyl modified nucleotide
  modified_base 87: mod_base = OTHER; note = 2'-O-methyl modified nucleotide
  modified_base 88: mod_base = OTHER; note = 2'-O-methyl modified nucleotide
  modified_base 89: mod_base = OTHER; note = 2'-O-methyl modified nucleotide
  modified_base 90: mod_base = OTHER; note = 2'-O-methyl modified nucleotide
  modified_base 91: mod_base = OTHER; note = 2'-O-methyl modified nucleotide
  modified_base 92: mod_base = OTHER; note = 2'-O-methyl modified nucleotide
  modified_base 93: mod_base = OTHER; note = 2'-O-methyl modified nucleotide
  modified_base 94: mod_base = OTHER; note = 2'-O-methyl modified nucleotide
  modified_base 95: mod_base = OTHER; note = 2'-O-methyl modified nucleotide
  modified_base 96: mod_base = OTHER; note = 2'-O-methyl modified nucleotide
  modified_base 118: mod_base = OTHER; note = Nucleotide with phosphorothioate linkage
  modified_base 119: mod_base = OTHER; note = 2'-O-methyl modified nucleotide with phosphorothioate linkage
  modified_base 120: mod_base = OTHER; note = 2'-O-methyl modified nucleotide with phosphorothioate linkage
  modified_base 121: mod_base = OTHER; note = 2'-O-methyl modified nucleotide
gagtagcgcgagcacagctagttttagagctagaaatagcaagttaaaataaggctagtccgttatcaacttgaaaaagtggcaccgagtcggtgccgtggccttagtaacctgtgctcgc

SEQ ID NO: 17749 - RNA, 120 nt, synthetic construct
  source 1..120: mol_type = other RNA
  modified_base 1: mod_base = OTHER; note = 2'-O-methyl modified nucleotide with phosphorothioate linkage
  modified_base 2: mod_base = OTHER; note = 2'-O-methyl modified nucleotide with phosphorothioate linkage
  modified_base 3: mod_base = OTHER; note = 2'-O-methyl modified nucleotide with phosphorothioate linkage
  modified_base 29: mod_base = OTHER; note = 2'-O-methyl modified nucleotide
  modified_base 30: mod_base = OTHER; note = 2'-O-methyl modified nucleotide
  modified_base 31: mod_base = OTHER; note = 2'-O-methyl modified nucleotide
  modified_base 32: mod_base = OTHER; note = 2'-O-methyl modified nucleotide
  modified_base 33: mod_base = OTHER; note = 2'-O-methyl modified nucleotide
  modified_base 34: mod_base = OTHER; note = 2'-O-methyl modified nucleotide
  modified_base 35: mod_base = OTHER; note = 2'-O-methyl modified nucleotide
  modified_base 36: mod_base = OTHER; note = 2'-O-methyl modified nucleotide
  modified_base 37: mod_base = OTHER; note = 2'-O-methyl modified nucleotide
  modified_base 38: mod_base = OTHER; note = 2'-O-methyl modified nucleotide
  modified_base 39: mod_base = OTHER; note = 2'-O-methyl modified nucleotide
  modified_base 40: mod_base = OTHER; note = 2'-O-methyl modified nucleotide
  modified_base 69: mod_base = OTHER; note = 2'-O-methyl modified nucleotide
  modified_base 70: mod_base = OTHER; note = 2'-O-methyl modified nucleotide
  modified_base 71: mod_base = OTHER; note = 2'-O-methyl modified nucleotide
  modified_base 72: mod_base = OTHER; note = 2'-O-methyl modified nucleotide
  modified_base 73: mod_base = OTHER; note = 2'-O-methyl modified nucleotide
  modified_base 74: mod_base = OTHER; note = 2'-O-methyl modified nucleotide
  modified_base 75: mod_base = OTHER; note = 2'-O-methyl modified nucleotide
  modified_base 76: mod_base = OTHER; note = 2'-O-methyl modified nucleotide
  modified_base 77: mod_base = OTHER; note = 2'-O-methyl modified nucleotide
  modified_base 78: mod_base = OTHER; note = 2'-O-methyl modified nucleotide
  modified_base 79: mod_base = OTHER; note = 2'-O-methyl modified nucleotide
  modified_base 80: mod_base = OTHER; note = 2'-O-methyl modified nucleotide
  modified_base 81: mod_base = OTHER; note = 2'-O-methyl modified nucleotide
  modified_base 82: mod_base = OTHER; note = 2'-O-methyl modified nucleotide
  modified_base 83: mod_base = OTHER; note = 2'-O-methyl modified nucleotide
  modified_base 84: mod_base = OTHER; note = 2'-O-methyl modified nucleotide
  modified_base 85: mod_base = OTHER; note = 2'-O-methyl modified nucleotide
  modified_base 86: mod_base = OTHER; note = 2'-O-methyl modified nucleotide
  modified_base 87: mod_base = OTHER; note = 2'-O-methyl modified nucleotide
  modified_base 88: mod_base = OTHER; note = 2'-O-methyl modified nucleotide
  modified_base 89: mod_base = OTHER; note = 2'-O-methyl modified nucleotide
  modified_base 90: mod_base = OTHER; note = 2'-O-methyl modified nucleotide
  modified_base 91: mod_base = OTHER; note = 2'-O-methyl modified nucleotide
  modified_base 92: mod_base = OTHER; note = 2'-O-methyl modified nucleotide
  modified_base 93: mod_base = OTHER; note = 2'-O-methyl modified nucleotide
  modified_base 94: mod_base = OTHER; note = 2'-O-methyl modified nucleotide
  modified_base 95: mod_base = OTHER; note = 2'-O-methyl modified nucleotide
  modified_base 96: mod_base = OTHER; note = 2'-O-methyl modified nucleotide
  modified_base 117: mod_base = OTHER; note = Nucleotide with phosphorothioate linkage
  modified_base 118: mod_base = OTHER; note = 2'-O-methyl modified nucleotide with phosphorothioate linkage
  modified_base 119: mod_base = OTHER; note = 2'-O-methyl modified nucleotide with phosphorothioate linkage
  modified_base 120: mod_base = OTHER; note = 2'-O-methyl modified nucleotide
gagtagcgcgagcacagctagttttagagctagaaatagcaagttaaaataaggctagtccgttatcaacttgaaaaagtggcaccgagtcggtgccgtggccttagtaacctgtgctcg

SEQ ID NO: 17750 - RNA, 119 nt, synthetic construct
  source 1..119: mol_type = other RNA
  modified_base 1: mod_base = OTHER; note = 2'-O-methyl modified nucleotide with phosphorothioate linkage
  modified_base 2: mod_base = OTHER; note = 2'-O-methyl modified nucleotide with phosphorothioate linkage
  modified_base 3: mod_base = OTHER; note = 2'-O-methyl modified nucleotide with phosphorothioate linkage
  modified_base 29: mod_base = OTHER; note = 2'-O-methyl modified nucleotide
  modified_base 30: mod_base = OTHER; note = 2'-O-methyl modified nucleotide
  modified_base 31: mod_base = OTHER; note = 2'-O-methyl modified nucleotide
  modified_base 32: mod_base = OTHER; note = 2'-O-methyl modified nucleotide
  modified_base 33: mod_base = OTHER; note = 2'-O-methyl modified nucleotide
  modified_base 34: mod_base = OTHER; note = 2'-O-methyl modified nucleotide
  modified_base 35: mod_base = OTHER; note = 2'-O-methyl modified nucleotide
  modified_base 36: mod_base = OTHER; note = 2'-O-methyl modified nucleotide
  modified_base 37: mod_base = OTHER; note = 2'-O-methyl modified nucleotide
  modified_base 38: mod_base = OTHER; note = 2'-O-methyl modified nucleotide
  modified_base 39: mod_base = OTHER; note = 2'-O-methyl modified nucleotide
  modified_base 40: mod_base = OTHER; note = 2'-O-methyl modified nucleotide
  modified_base 69: mod_base = OTHER; note = 2'-O-methyl modified nucleotide
  modified_base 70: mod_base = OTHER; note = 2'-O-methyl modified nucleotide
  modified_base 71: mod_base = OTHER; note = 2'-O-methyl modified nucleotide
  modified_base 72: mod_base = OTHER; note = 2'-O-methyl modified nucleotide
  modified_base 73: mod_base = OTHER; note = 2'-O-methyl modified nucleotide
  modified_base 74: mod_base = OTHER; note = 2'-O-methyl modified nucleotide
  modified_base 75: mod_base = OTHER; note = 2'-O-methyl modified nucleotide
  modified_base 76: mod_base = OTHER; note = 2'-O-methyl modified nucleotide
  modified_base 77: mod_base = OTHER; note = 2'-O-methyl modified nucleotide
  modified_base 78: mod_base = OTHER; note = 2'-O-methyl modified nucleotide
  modified_base 79: mod_base = OTHER; note = 2'-O-methyl modified nucleotide
  modified_base 80: mod_base = OTHER; note = 2'-O-methyl modified nucleotide
  modified_base 81: mod_base = OTHER; note = 2'-O-methyl modified nucleotide
  modified_base 82: mod_base = OTHER; note = 2'-O-methyl modified nucleotide
  modified_base 83: mod_base = OTHER; note = 2'-O-methyl modified nucleotide
  modified_base 84: mod_base = OTHER; note = 2'-O-methyl modified nucleotide
  modified_base 85: mod_base = OTHER; note = 2'-O-methyl modified nucleotide
  modified_base 86: mod_base = OTHER; note = 2'-O-methyl modified nucleotide
  modified_base 87: mod_base = OTHER; note = 2'-O-methyl modified nucleotide
  modified_base 88: mod_base = OTHER; note = 2'-O-methyl modified nucleotide
  modified_base 89: mod_base = OTHER; note = 2'-O-methyl modified nucleotide
  modified_base 90: mod_base = OTHER; note = 2'-O-methyl modified nucleotide
  modified_base 91: mod_base = OTHER; note = 2'-O-methyl modified nucleotide
  modified_base 92: mod_base = OTHER; note = 2'-O-methyl modified nucleotide
  modified_base 93: mod_base = OTHER; note = 2'-O-methyl modified nucleotide
  modified_base 94: mod_base = OTHER; note = 2'-O-methyl modified nucleotide
  modified_base 95: mod_base = OTHER; note = 2'-O-methyl modified nucleotide
  modified_base 96: mod_base = OTHER; note = 2'-O-methyl modified nucleotide
  modified_base 116: mod_base = OTHER; note = Nucleotide with phosphorothioate linkage
  modified_base 117: mod_base = OTHER; note = 2'-O-methyl modified nucleotide with phosphorothioate linkage
  modified_base 118: mod_base = OTHER; note = 2'-O-methyl modified nucleotide with phosphorothioate linkage
  modified_base 119: mod_base = OTHER; note = 2'-O-methyl modified nucleotide
gagtagcgcgagcacagctagttttagagctagaaatagcaagttaaaataaggctagtccgttatcaacttgaaaaagtggcaccgagtcggtgccgtggccttagtaacctgtgctc

SEQ ID NO: 17751 - RNA, 126 nt, synthetic construct
  source 1..126: mol_type = other RNA
  modified_base 1: mod_base = OTHER; note = 2'-O-methyl modified nucleotide with phosphorothioate linkage
  modified_base 2: mod_base = OTHER; note = 2'-O-methyl modified nucleotide with phosphorothioate linkage
  modified_base 3: mod_base = OTHER; note = 2'-O-methyl modified nucleotide with phosphorothioate linkage
  modified_base 29: mod_base = OTHER; note = 2'-O-methyl modified nucleotide
  modified_base 30: mod_base = OTHER; note = 2'-O-methyl modified nucleotide
  modified_base 31: mod_base = OTHER; note = 2'-O-methyl modified nucleotide
  modified_base 32: mod_base = OTHER; note = 2'-O-methyl modified nucleotide
  modified_base 33: mod_base = OTHER; note = 2'-O-methyl modified nucleotide
  modified_base 34: mod_base = OTHER; note = 2'-O-methyl modified nucleotide
  modified_base 35: mod_base = OTHER; note = 2'-O-methyl modified nucleotide
  modified_base 36: mod_base = OTHER; note = 2'-O-methyl modified nucleotide
  modified_base 37: mod_base = OTHER; note = 2'-O-methyl modified nucleotide
  modified_base 38: mod_base = OTHER; note = 2'-O-methyl modified nucleotide
  modified_base 39: mod_base = OTHER; note = 2'-O-methyl modified nucleotide
  modified_base 40: mod_base = OTHER; note = 2'-O-methyl modified nucleotide
  modified_base 69: mod_base = OTHER; note = 2'-O-methyl modified nucleotide
  modified_base 70: mod_base = OTHER; note = 2'-O-methyl modified nucleotide
  modified_base 71: mod_base = OTHER; note = 2'-O-methyl modified nucleotide
  modified_base 72: mod_base = OTHER; note = 2'-O-methyl modified nucleotide
  modified_base 73: mod_base = OTHER; note = 2'-O-methyl modified nucleotide
  modified_base 74: mod_base = OTHER; note = 2'-O-methyl modified nucleotide
  modified_base 75: mod_base = OTHER; note = 2'-O-methyl modified nucleotide
  modified_base 76: mod_base = OTHER; note = 2'-O-methyl modified nucleotide
  modified_base 77: mod_base = OTHER; note = 2'-O-methyl modified nucleotide
  modified_base 78: mod_base = OTHER; note = 2'-O-methyl modified nucleotide
  modified_base 79: mod_base = OTHER; note = 2'-O-methyl modified nucleotide
  modified_base 80: mod_base = OTHER; note = 2'-O-methyl modified nucleotide
  modified_base 81: mod_base = OTHER; note = 2'-O-methyl modified nucleotide
  modified_base 82: mod_base = OTHER; note = 2'-O-methyl modified nucleotide
  modified_base 83: mod_base = OTHER; note = 2'-O-methyl modified nucleotide
  modified_base 84: mod_base = OTHER; note = 2'-O-methyl modified nucleotide
  modified_base 85: mod_base = OTHER; note = 2'-O-methyl modified nucleotide
  modified_base 86: mod_base = OTHER; note = 2'-O-methyl modified nucleotide
  modified_base 87: mod_base = OTHER; note = 2'-O-methyl modified nucleotide
  modified_base 88: mod_base = OTHER; note = 2'-O-methyl modified nucleotide
  modified_base 89: mod_base = OTHER; note = 2'-O-methyl modified nucleotide
  modified_base 90: mod_base = OTHER; note = 2'-O-methyl modified nucleotide
  modified_base 91: mod_base = OTHER; note = 2'-O-methyl modified nucleotide
  modified_base 92: mod_base = OTHER; note = 2'-O-methyl modified nucleotide
  modified_base 93: mod_base = OTHER; note = 2'-O-methyl modified nucleotide
  modified_base 94: mod_base = OTHER; note = 2'-O-methyl modified nucleotide
  modified_base 95: mod_base = OTHER; note = 2'-O-methyl modified nucleotide
  modified_base 96: mod_base = OTHER; note = 2'-O-methyl modified nucleotide
  modified_base 123: mod_base = OTHER; note = Nucleotide with phosphorothioate linkage
  modified_base 124: mod_base = OTHER; note = 2'-O-methyl modified nucleotide with phosphorothioate linkage
  modified_base 125: mod_base = OTHER; note = 2'-O-methyl modified nucleotide with phosphorothioate linkage
  modified_base 126: mod_base = OTHER; note = 2'-O-methyl modified nucleotide
gagtagcgcgagcacagctagttttagagctagaaatagcaagttaaaataaggctagtccgttatcaacttgaaaaagtggcaccgagtcggtgctccgtggccttagtaacctgtgctcgcgct

SEQ ID NO: 17752 - RNA, 125 nt, synthetic construct
  source 1..125: mol_type = other RNA
  modified_base 1: mod_base = OTHER; note = 2'-O-methyl modified nucleotide with phosphorothioate linkage
  modified_base 2: mod_base = OTHER; note = 2'-O-methyl modified nucleotide with phosphorothioate linkage
  modified_base 3: mod_base = OTHER; note = 2'-O-methyl modified nucleotide with phosphorothioate linkage
  modified_base 29: mod_base = OTHER; note = 2'-O-methyl modified nucleotide
  modified_base 30: mod_base = OTHER; note = 2'-O-methyl modified nucleotide
  modified_base 31: mod_base = OTHER; note = 2'-O-methyl modified nucleotide
  modified_base 32: mod_base = OTHER; note = 2'-O-methyl modified nucleotide
  modified_base 33: mod_base = OTHER; note = 2'-O-methyl modified nucleotide
  modified_base 34: mod_base = OTHER; note = 2'-O-methyl modified nucleotide
  modified_base 35: mod_base = OTHER; note = 2'-O-methyl modified nucleotide
  modified_base 36: mod_base = OTHER; note = 2'-O-methyl modified nucleotide
  modified_base 37: mod_base = OTHER; note = 2'-O-methyl modified nucleotide
  modified_base 38: mod_base = OTHER; note = 2'-O-methyl modified nucleotide
  modified_base 39: mod_base = OTHER; note = 2'-O-methyl modified nucleotide
  modified_base 40: mod_base = OTHER; note = 2'-O-methyl modified nucleotide
  modified_base 69: mod_base = OTHER; note = 2'-O-methyl modified nucleotide
  modified_base 70: mod_base = OTHER; note = 2'-O-methyl modified nucleotide
  modified_base 71: mod_base = OTHER; note = 2'-O-methyl modified nucleotide
  modified_base 72: mod_base = OTHER; note = 2'-O-methyl modified nucleotide
  modified_base 73: mod_base = OTHER; note = 2'-O-methyl modified nucleotide
  modified_base 74: mod_base = OTHER; note = 2'-O-methyl modified nucleotide
  modified_base 75: mod_base = OTHER; note = 2'-O-methyl modified nucleotide
  modified_base 76: mod_base = OTHER; note = 2'-O-methyl modified nucleotide
  modified_base 77: mod_base = OTHER; note = 2'-O-methyl modified nucleotide
  modified_base 78: mod_base = OTHER; note = 2'-O-methyl modified nucleotide
  modified_base 79: mod_base = OTHER; note = 2'-O-methyl modified nucleotide
  modified_base 80: mod_base = OTHER; note = 2'-O-methyl modified nucleotide
  modified_base 81: mod_base = OTHER; note = 2'-O-methyl modified nucleotide
  modified_base 82: mod_base = OTHER; note = 2'-O-methyl modified nucleotide
  modified_base 83: mod_base = OTHER; note = 2'-O-methyl modified nucleotide
  modified_base 84: mod_base = OTHER; note = 2'-O-methyl modified nucleotide
  modified_base 85: mod_base = OTHER; note = 2'-O-methyl modified nucleotide
  modified_base 86: mod_base = OTHER; note = 2'-O-methyl modified nucleotide
  modified_base 87: mod_base = OTHER; note = 2'-O-methyl modified nucleotide
  modified_base 88: mod_base = OTHER; note = 2'-O-methyl modified nucleotide
  modified_base 89: mod_base = OTHER; note = 2'-O-methyl modified nucleotide
  modified_base 90: mod_base = OTHER; note = 2'-O-methyl modified nucleotide
  modified_base 91: mod_base = OTHER; note = 2'-O-methyl modified nucleotide
  modified_base 92: mod_base = OTHER; note = 2'-O-methyl modified nucleotide
  modified_base 93: mod_base = OTHER; note = 2'-O-methyl modified nucleotide
  modified_base 94: mod_base = OTHER; note = 2'-O-methyl modified nucleotide
  modified_base 95: mod_base = OTHER; note = 2'-O-methyl modified nucleotide
  modified_base 96: mod_base = OTHER; note = 2'-O-methyl modified nucleotide
  modified_base 122: mod_base = OTHER; note = Nucleotide with phosphorothioate linkage
  modified_base 123: mod_base = OTHER; note = 2'-O-methyl modified nucleotide with phosphorothioate linkage
  modified_base 124: mod_base = OTHER; note = 2'-O-methyl modified nucleotide with phosphorothioate linkage
  modified_base 125: mod_base = OTHER; note = 2'-O-methyl modified nucleotide
gagtagcgcgagcacagctagttttagagctagaaatagcaagttaaaataaggctagtccgttatcaacttgaaaaagtggcaccgagtcggtgctccgtggccttagtaacctgtgctcgcgc

SEQ ID NO: 17753 - RNA, 124 nt, synthetic construct
  source 1..124: mol_type = other RNA
  modified_base 1: mod_base = OTHER; note = 2'-O-methyl modified nucleotide with phosphorothioate linkage
  modified_base 2: mod_base = OTHER; note = 2'-O-methyl modified nucleotide with phosphorothioate linkage
  modified_base 3: mod_base = OTHER; note = 2'-O-methyl modified nucleotide with phosphorothioate linkage
  modified_base 29: mod_base = OTHER; note = 2'-O-methyl modified nucleotide
  modified_base 30: mod_base = OTHER; note = 2'-O-methyl modified nucleotide
  modified_base 31: mod_base = OTHER; note = 2'-O-methyl modified nucleotide
  modified_base 32: mod_base = OTHER; note = 2'-O-methyl modified nucleotide
  modified_base 33: mod_base = OTHER; note = 2'-O-methyl modified nucleotide
  modified_base 34: mod_base = OTHER; note = 2'-O-methyl modified nucleotide
  modified_base 35: mod_base = OTHER; note = 2'-O-methyl modified nucleotide
  modified_base 36: mod_base = OTHER; note = 2'-O-methyl modified nucleotide
  modified_base 37: mod_base = OTHER; note = 2'-O-methyl modified nucleotide
  modified_base 38: mod_base = OTHER; note = 2'-O-methyl modified nucleotide
  modified_base 39: mod_base = OTHER; note = 2'-O-methyl modified nucleotide
  modified_base 40: mod_base = OTHER; note = 2'-O-methyl modified nucleotide
  modified_base 69: mod_base = OTHER; note = 2'-O-methyl modified nucleotide
  modified_base 70: mod_base = OTHER; note = 2'-O-methyl modified nucleotide
  modified_base 71: mod_base = OTHER; note = 2'-O-methyl modified nucleotide
  modified_base 72: mod_base = OTHER; note = 2'-O-methyl modified nucleotide
  modified_base 73: mod_base = OTHER; note = 2'-O-methyl modified nucleotide
  modified_base 74: mod_base = OTHER; note = 2'-O-methyl modified nucleotide
  modified_base 75: mod_base = OTHER; note = 2'-O-methyl modified nucleotide
  modified_base 76: mod_base = OTHER; note = 2'-O-methyl modified nucleotide
  modified_base 77: mod_base = OTHER; note = 2'-O-methyl modified nucleotide
  modified_base 78: mod_base = OTHER; note = 2'-O-methyl modified nucleotide
  modified_base 79: mod_base = OTHER; note = 2'-O-methyl modified nucleotide
  modified_base 80: mod_base = OTHER; note = 2'-O-methyl modified nucleotide
  modified_base 81: mod_base = OTHER; note = 2'-O-methyl modified nucleotide
  modified_base 82: mod_base = OTHER; note = 2'-O-methyl modified nucleotide
  modified_base 83: mod_base = OTHER; note = 2'-O-methyl modified nucleotide
  modified_base 84: mod_base = OTHER; note = 2'-O-methyl modified nucleotide
  modified_base 85: mod_base = OTHER; note = 2'-O-methyl modified nucleotide
  modified_base 86: mod_base = OTHER; note = 2'-O-methyl modified nucleotide
  modified_base 87: mod_base = OTHER; note = 2'-O-methyl modified nucleotide
  modified_base 88: mod_base = OTHER; note = 2'-O-methyl modified nucleotide
  modified_base 89: mod_base = OTHER; note = 2'-O-methyl modified nucleotide
  modified_base 90: mod_base = OTHER; note = 2'-O-methyl modified nucleotide
  modified_base 91: mod_base = OTHER; note = 2'-O-methyl modified nucleotide
  modified_base 92: mod_base = OTHER; note = 2'-O-methyl modified nucleotide
  modified_base 93: mod_base = OTHER; note = 2'-O-methyl modified nucleotide
  modified_base 94: mod_base = OTHER; note = 2'-O-methyl modified nucleotide
  modified_base 95: mod_base = OTHER; note = 2'-O-methyl modified nucleotide
  modified_base 96: mod_base = OTHER; note = 2'-O-methyl modified nucleotide
  modified_base 121: mod_base = OTHER; note = Nucleotide with phosphorothioate linkage
  modified_base 122: mod_base = OTHER; note = 2'-O-methyl modified nucleotide with phosphorothioate linkage
  modified_base 123: mod_base = OTHER; note = 2'-O-methyl modified nucleotide with phosphorothioate linkage
  modified_base 124: mod_base = OTHER; note = 2'-O-methyl modified nucleotide
gagtagcgcgagcacagctagttttagagctagaaatagcaagttaaaataaggctagtccgttatcaacttgaaaaagtggcaccgagtcggtgctccgtggccttagtaacctgtgctcgcg

SEQ ID NO: 17754 - RNA, 123 nt, synthetic construct
  source 1..123: mol_type = other RNA
  modified_base 1: mod_base = OTHER; note = 2'-O-methyl modified nucleotide with phosphorothioate linkage
  modified_base 2: mod_base = OTHER; note = 2'-O-methyl modified nucleotide with phosphorothioate linkage
  modified_base 3: mod_base = OTHER; note = 2'-O-methyl modified nucleotide with phosphorothioate linkage
  modified_base 29: mod_base = OTHER; note = 2'-O-methyl modified nucleotide
  modified_base 30: mod_base = OTHER; note = 2'-O-methyl modified nucleotide
  modified_base 31: mod_base = OTHER; note = 2'-O-methyl modified nucleotide
  modified_base 32: mod_base = OTHER; note = 2'-O-methyl modified nucleotide
  modified_base 33: mod_base = OTHER; note = 2'-O-methyl modified nucleotide
  modified_base 34: mod_base = OTHER; note = 2'-O-methyl modified nucleotide
  modified_base 35: mod_base = OTHER; note = 2'-O-methyl modified nucleotide
  modified_base 36: mod_base = OTHER; note = 2'-O-methyl modified nucleotide
  modified_base 37: mod_base = OTHER; note = 2'-O-methyl modified nucleotide
  modified_base 38: mod_base = OTHER; note = 2'-O-methyl modified nucleotide
  modified_base 39: mod_base = OTHER; note = 2'-O-methyl modified nucleotide
  modified_base 40: mod_base = OTHER; note = 2'-O-methyl modified nucleotide
  modified_base 69: mod_base = OTHER; note = 2'-O-methyl modified nucleotide
  modified_base 70: mod_base = OTHER; note = 2'-O-methyl modified nucleotide
  modified_base 71: mod_base = OTHER; note = 2'-O-methyl modified nucleotide
  modified_base 72: mod_base = OTHER; note = 2'-O-methyl modified nucleotide
  modified_base 73: mod_base = OTHER; note = 2'-O-methyl modified nucleotide
  modified_base 74: mod_base = OTHER; note = 2'-O-methyl modified nucleotide
  modified_base 75: mod_base = OTHER; note = 2'-O-methyl modified nucleotide
  modified_base 76: mod_base = OTHER; note = 2'-O-methyl modified nucleotide
  modified_base 77: mod_base = OTHER; note = 2'-O-methyl modified nucleotide
  modified_base 78: mod_base = OTHER; note = 2'-O-methyl modified nucleotide
  modified_base 79: mod_base = OTHER; note = 2'-O-methyl modified nucleotide
  modified_base 80: mod_base = OTHER; note = 2'-O-methyl modified nucleotide
  modified_base 81: mod_base = OTHER; note = 2'-O-methyl modified nucleotide
  modified_base 82: mod_base = OTHER; note = 2'-O-methyl modified nucleotide
  modified_base 83: mod_base = OTHER; note = 2'-O-methyl modified nucleotide
  modified_base 84: mod_base = OTHER; note = 2'-O-methyl modified nucleotide
  modified_base 85: mod_base = OTHER; note = 2'-O-methyl modified nucleotide
  modified_base 86: mod_base = OTHER; note = 2'-O-methyl modified nucleotide
  modified_base 87: mod_base = OTHER; note = 2'-O-methyl modified nucleotide
  modified_base 88: mod_base = OTHER; note = 2'-O-methyl modified nucleotide
  modified_base 89: mod_base = OTHER; note = 2'-O-methyl modified nucleotide
  modified_base 90: mod_base = OTHER; note = 2'-O-methyl modified nucleotide
  modified_base 91: mod_base = OTHER; note = 2'-O-methyl modified nucleotide
  modified_base 92: mod_base = OTHER; note = 2'-O-methyl modified nucleotide
  modified_base 93: mod_base = OTHER; note = 2'-O-methyl modified nucleotide
  modified_base 94: mod_base = OTHER; note = 2'-O-methyl modified nucleotide
  modified_base 95: mod_base = OTHER; note = 2'-O-methyl modified nucleotide
  modified_base 96: mod_base = OTHER; note = 2'-O-methyl modified nucleotide
  modified_base 120: mod_base = OTHER; note = Nucleotide with phosphorothioate linkage
  modified_base 121: mod_base = OTHER; note = 2'-O-methyl modified nucleotide with phosphorothioate linkage
  modified_base 122: mod_base = OTHER; note = 2'-O-methyl modified nucleotide with phosphorothioate linkage
  modified_base 123: mod_base = OTHER; note = 2'-O-methyl modified nucleotide
gagtagcgcgagcacagctagttttagagctagaaatagcaagttaaaataaggctagtccgttatcaacttgaaaaagtggcaccgagtcggtgctccgtggccttagtaacctgtgctcgc

SEQ ID NO: 17755 - RNA, 122 nt, synthetic construct
  source 1..122: mol_type = other RNA
  modified_base 1: mod_base = OTHER; note = 2'-O-methyl modified nucleotide with phosphorothioate linkage
  modified_base 2: mod_base = OTHER; note = 2'-O-methyl modified nucleotide with phosphorothioate linkage
  modified_base 3: mod_base = OTHER; note = 2'-O-methyl modified nucleotide with phosphorothioate linkage
  modified_base 29: mod_base = OTHER; note = 2'-O-methyl modified nucleotide
  modified_base 30: mod_base = OTHER; note = 2'-O-methyl modified nucleotide
  modified_base 31: mod_base = OTHER; note = 2'-O-methyl modified nucleotide
  modified_base 32: mod_base = OTHER; note = 2'-O-methyl modified nucleotide
  modified_base 33: mod_base = OTHER; note = 2'-O-methyl modified nucleotide
  modified_base 34: mod_base = OTHER; note = 2'-O-methyl modified nucleotide
  modified_base 35: mod_base = OTHER; note = 2'-O-methyl modified nucleotide
  modified_base 36: mod_base = OTHER; note = 2'-O-methyl modified nucleotide
  modified_base 37: mod_base = OTHER; note = 2'-O-methyl modified nucleotide
  modified_base 38: mod_base = OTHER; note = 2'-O-methyl modified nucleotide
  modified_base 39: mod_base = OTHER; note = 2'-O-methyl modified nucleotide
  modified_base 40: mod_base = OTHER; note = 2'-O-methyl modified nucleotide
  modified_base 69: mod_base = OTHER; note = 2'-O-methyl modified nucleotide
  modified_base 70: mod_base = OTHER; note = 2'-O-methyl modified nucleotide
  modified_base 71: mod_base = OTHER; note = 2'-O-methyl modified nucleotide
  modified_base 72: mod_base = OTHER; note = 2'-O-methyl modified nucleotide
  modified_base 73: mod_base = OTHER; note = 2'-O-methyl modified nucleotide
  modified_base 74: mod_base = OTHER; note = 2'-O-methyl modified nucleotide
  modified_base 75: mod_base = OTHER; note = 2'-O-methyl modified nucleotide
  modified_base 76: mod_base = OTHER; note = 2'-O-methyl modified nucleotide
  modified_base 77: mod_base = OTHER; note = 2'-O-methyl modified nucleotide
  modified_base 78: mod_base = OTHER; note = 2'-O-methyl modified nucleotide
  modified_base 79: mod_base = OTHER; note = 2'-O-methyl modified nucleotide
  modified_base 80: mod_base = OTHER; note = 2'-O-methyl modified nucleotide
  modified_base 81: mod_base = OTHER; note = 2'-O-methyl modified nucleotide
  modified_base 82: mod_base = OTHER; note = 2'-O-methyl modified nucleotide
  modified_base 83: mod_base = OTHER; note = 2'-O-methyl modified nucleotide
  modified_base 84: mod_base = OTHER; note = 2'-O-methyl modified nucleotide
  modified_base 85: mod_base = OTHER; note = 2'-O-methyl modified nucleotide
  modified_base 86: mod_base = OTHER; note = 2'-O-methyl modified nucleotide
  modified_base 87: mod_base = OTHER; note = 2'-O-methyl modified nucleotide
  modified_base 88: mod_base = OTHER; note = 2'-O-methyl modified nucleotide
  modified_base 89: mod_base = OTHER; note = 2'-O-methyl modified nucleotide
  modified_base 90: mod_base = OTHER; note = 2'-O-methyl modified nucleotide
  modified_base 91: mod_base = OTHER; note = 2'-O-methyl modified nucleotide
  modified_base 92: mod_base = OTHER; note = 2'-O-methyl modified nucleotide
  modified_base 93: mod_base = OTHER; note = 2'-O-methyl modified nucleotide
  modified_base 94: mod_base = OTHER; note = 2'-O-methyl modified nucleotide
  modified_base 95: mod_base = OTHER; note = 2'-O-methyl modified nucleotide
  modified_base 96: mod_base = OTHER; note = 2'-O-methyl modified nucleotide
  modified_base 119: mod_base = OTHER; note = Nucleotide with phosphorothioate linkage
  modified_base 120: mod_base = OTHER; note = 2'-O-methyl modified nucleotide with phosphorothioate linkage
  modified_base 121: mod_base = OTHER; note = 2'-O-methyl modified nucleotide with phosphorothioate linkage
  modified_base 122: mod_base = OTHER; note = 2'-O-methyl modified nucleotide
gagtagcgcgagcacagctagttttagagctagaaatagcaagttaaaataaggctagtccgttatcaacttgaaaaagtggcaccgagtcggtgctccgtggccttagtaacctgtgctcg

SEQ ID NO: 17756 - RNA, 121 nt, synthetic construct
  source 1..121: mol_type = other RNA
  modified_base 1: mod_base = OTHER; note = 2'-O-methyl modified nucleotide with phosphorothioate linkage
  modified_base 2: mod_base = OTHER; note = 2'-O-methyl modified nucleotide with phosphorothioate linkage
  modified_base 3: mod_base = OTHER; note = 2'-O-methyl modified nucleotide with phosphorothioate linkage
  modified_base 29: mod_base = OTHER; note = 2'-O-methyl modified nucleotide
  modified_base 30: mod_base = OTHER; note = 2'-O-methyl modified nucleotide
  modified_base 31: mod_base = OTHER; note = 2'-O-methyl modified nucleotide
  modified_base 32: mod_base = OTHER; note = 2'-O-methyl modified nucleotide
  modified_base 33: mod_base = OTHER; note = 2'-O-methyl modified nucleotide
  modified_base 34: mod_base = OTHER; note = 2'-O-methyl modified nucleotide
  modified_base 35: mod_base = OTHER; note = 2'-O-methyl modified nucleotide
  modified_base 36: mod_base = OTHER; note = 2'-O-methyl modified nucleotide
  modified_base 37: mod_base = OTHER; note = 2'-O-methyl modified nucleotide
  modified_base 38: mod_base = OTHER; note = 2'-O-methyl modified nucleotide
  modified_base 39: mod_base = OTHER; note = 2'-O-methyl modified nucleotide
  modified_base 40: mod_base = OTHER; note = 2'-O-methyl modified nucleotide
  modified_base 69: mod_base = OTHER; note = 2'-O-methyl modified nucleotide
  modified_base 70: mod_base = OTHER; note = 2'-O-methyl modified nucleotide
  modified_base 71: mod_base = OTHER; note = 2'-O-methyl modified nucleotide
  modified_base 72: mod_base = OTHER; note = 2'-O-methyl modified nucleotide
  modified_base 73: mod_base = OTHER; note = 2'-O-methyl modified nucleotide
  modified_base 74: mod_base = OTHER; note = 2'-O-methyl modified nucleotide
  modified_base 75: mod_base = OTHER; note = 2'-O-methyl modified nucleotide
  modified_base 76: mod_base = OTHER; note = 2'-O-methyl modified nucleotide
  modified_base 77: mod_base = OTHER; note = 2'-O-methyl modified nucleotide
  modified_base 78: mod_base = OTHER; note = 2'-O-methyl modified nucleotide
  modified_base 79: mod_base = OTHER; note = 2'-O-methyl modified nucleotide
  modified_base 80: mod_base = OTHER; note = 2'-O-methyl modified nucleotide
  modified_base 81: mod_base = OTHER; note = 2'-O-methyl modified nucleotide
  modified_base 82: mod_base = OTHER; note = 2'-O-methyl modified nucleotide
  modified_base 83: mod_base = OTHER; note = 2'-O-methyl modified nucleotide
  modified_base 84: mod_base = OTHER; note = 2'-O-methyl modified nucleotide
  modified_base 85: mod_base = OTHER; note = 2'-O-methyl modified nucleotide
  modified_base 86: mod_base = OTHER; note = 2'-O-methyl modified nucleotide
  modified_base 87: mod_base = OTHER; note = 2'-O-methyl modified nucleotide
  modified_base 88: mod_base = OTHER; note = 2'-O-methyl modified nucleotide
  modified_base 89: mod_base = OTHER; note = 2'-O-methyl modified nucleotide
  modified_base 90: mod_base = OTHER; note = 2'-O-methyl modified nucleotide
  modified_base 91: mod_base = OTHER; note = 2'-O-methyl modified nucleotide
  modified_base 92: mod_base = OTHER; note = 2'-O-methyl modified nucleotide
  modified_base 93: mod_base = OTHER; note = 2'-O-methyl modified nucleotide
  modified_base 94: mod_base = OTHER; note = 2'-O-methyl modified nucleotide
  modified_base 95: mod_base = OTHER; note = 2'-O-methyl modified nucleotide
  modified_base 96: mod_base = OTHER; note = 2'-O-methyl modified nucleotide
  modified_base 118: mod_base = OTHER; note = Nucleotide with phosphorothioate linkage
  modified_base 119: mod_base = OTHER; note = 2'-O-methyl modified nucleotide with phosphorothioate linkage
  modified_base 120: mod_base = OTHER; note = 2'-O-methyl modified nucleotide with phosphorothioate linkage
  modified_base 121: mod_base = OTHER; note = 2'-O-methyl modified nucleotide
gagtagcgcgagcacagctagttttagagctagaaatagcaagttaaaataaggctagtccgttatcaacttgaaaaagtggcaccgagtcggtgctccgtggccttagtaacctgtgctc

SEQ ID NO: 17757 - RNA, 128 nt, synthetic construct
  source 1..128: mol_type = other RNA
  modified_base 1: mod_base = OTHER; note = 2'-O-methyl modified nucleotide with phosphorothioate linkage
  modified_base 2: mod_base = OTHER; note = 2'-O-methyl modified nucleotide with phosphorothioate linkage
  modified_base 3: mod_base = OTHER; note = 2'-O-methyl modified nucleotide with phosphorothioate linkage
  modified_base 29: mod_base = OTHER; note = 2'-O-methyl modified nucleotide
  modified_base 30: mod_base = OTHER; note = 2'-O-methyl modified nucleotide
  modified_base 31: mod_base = OTHER; note = 2'-O-methyl modified nucleotide
  modified_base 32: mod_base = OTHER; note = 2'-O-methyl modified nucleotide
  modified_base 33: mod_base = OTHER; note = 2'-O-methyl modified nucleotide
  modified_base 34: mod_base = OTHER; note = 2'-O-methyl modified nucleotide
  modified_base 35: mod_base = OTHER; note = 2'-O-methyl modified nucleotide
  modified_base 36: mod_base = OTHER; note = 2'-O-methyl modified nucleotide
  modified_base 37: mod_base = OTHER; note = 2'-O-methyl modified nucleotide
  modified_base 38: mod_base = OTHER; note = 2'-O-methyl modified nucleotide
  modified_base 39: mod_base = OTHER; note = 2'-O-methyl modified nucleotide
  modified_base 40: mod_base = OTHER; note = 2'-O-methyl modified nucleotide
  modified_base 69: mod_base = OTHER; note = 2'-O-methyl modified nucleotide
  modified_base 70: mod_base = OTHER; note = 2'-O-methyl modified nucleotide
  modified_base 71: mod_base = OTHER; note = 2'-O-methyl modified nucleotide
  modified_base 72: mod_base = OTHER; note = 2'-O-methyl modified nucleotide
  modified_base 73: mod_base = OTHER; note = 2'-O-methyl modified nucleotide
  modified_base 74: mod_base = OTHER; note = 2'-O-methyl modified nucleotide
  modified_base 75: mod_base = OTHER; note = 2'-O-methyl modified nucleotide
  modified_base 76: mod_base = OTHER; note = 2'-O-methyl modified nucleotide
  modified_base 77: mod_base = OTHER; note = 2'-O-methyl modified nucleotide
  modified_base 78: mod_base = OTHER; note = 2'-O-methyl modified nucleotide
  modified_base 79: mod_base = OTHER; note = 2'-O-methyl modified nucleotide
  modified_base 80: mod_base = OTHER; note = 2'-O-methyl modified nucleotide
  modified_base 81: mod_base = OTHER; note = 2'-O-methyl modified nucleotide
  modified_base 82: mod_base = OTHER; note = 2'-O-methyl modified nucleotide
  modified_base 83: mod_base = OTHER; note = 2'-O-methyl modified nucleotide
  modified_base 84: mod_base = OTHER; note = 2'-O-methyl modified nucleotide
  modified_base 85: mod_base = OTHER; note = 2'-O-methyl modified nucleotide
  modified_base 86: mod_base = OTHER; note = 2'-O-methyl modified nucleotide
  modified_base 87: mod_base = OTHER; note = 2'-O-methyl modified nucleotide
  modified_base 88: mod_base = OTHER; note = 2'-O-methyl modified nucleotide
  modified_base 89: mod_base = OTHER; note = 2'-O-methyl modified nucleotide
  modified_base 90: mod_base = OTHER; note = 2'-O-methyl modified nucleotide
  modified_base 91: mod_base = OTHER; note = 2'-O-methyl modified nucleotide
  modified_base 92: mod_base = OTHER; note = 2'-O-methyl modified nucleotide
  modified_base 93: mod_base = OTHER; note = 2'-O-methyl modified nucleotide
  modified_base 94: mod_base = OTHER; note = 2'-O-methyl modified nucleotide
  modified_base 95: mod_base = OTHER; note = 2'-O-methyl modified nucleotide
  modified_base 96: mod_base = OTHER; note = 2'-O-methyl modified nucleotide
  modified_base 125: mod_base = OTHER; note = Nucleotide with phosphorothioate linkage
  modified_base 126: mod_base = OTHER; note = 2'-O-methyl modified nucleotide with phosphorothioate linkage
  modified_base 127: mod_base = OTHER; note = 2'-O-methyl modified nucleotide with phosphorothioate linkage
  modified_base 128: mod_base = OTHER; note = 2'-O-methyl modified nucleotide
gagtagcgcgagcacagctagttttagagctagaaatagcaagttaaaataaggctagtccgttatcaacttgaaaaagtggcaccgagtcggtgcgctccgtggccttagtaacctgtgctcgcgct

SEQ ID NO: 17758 - RNA, 127 nt, synthetic construct
  source 1..127: mol_type = other RNA
  modified_base 1: mod_base = OTHER; note = 2'-O-methyl modified nucleotide with phosphorothioate linkage
  modified_base 2: mod_base = OTHER; note = 2'-O-methyl modified nucleotide with phosphorothioate linkage
  modified_base 3: mod_base = OTHER; note = 2'-O-methyl modified nucleotide with phosphorothioate linkage
  modified_base 29: mod_base = OTHER; note = 2'-O-methyl modified nucleotide
  modified_base 30: mod_base = OTHER; note = 2'-O-methyl modified nucleotide
  modified_base 31: mod_base = OTHER; note = 2'-O-methyl modified nucleotide
  modified_base 32: mod_base = OTHER; note = 2'-O-methyl modified nucleotide
  modified_base 33: mod_base = OTHER; note = 2'-O-methyl modified nucleotide
  modified_base 34: mod_base = OTHER; note = 2'-O-methyl modified nucleotide
  modified_base 35: mod_base = OTHER; note = 2'-O-methyl modified nucleotide
  modified_base 36: mod_base = OTHER; note = 2'-O-methyl modified nucleotide
  modified_base 37: mod_base = OTHER; note = 2'-O-methyl modified nucleotide
  modified_base 38: mod_base = OTHER; note = 2'-O-methyl modified nucleotide
  modified_base 39: mod_base = OTHER; note = 2'-O-methyl modified nucleotide
  modified_base 40: mod_base = OTHER; note = 2'-O-methyl modified nucleotide
  modified_base 69: mod_base = OTHER; note = 2'-O-methyl modified nucleotide
  modified_base 70: mod_base = OTHER; note = 2'-O-methyl modified nucleotide
  modified_base 71: mod_base = OTHER; note = 2'-O-methyl modified nucleotide
  modified_base 72: mod_base = OTHER; note = 2'-O-methyl modified nucleotide
  modified_base 73: mod_base = OTHER; note = 2'-O-methyl modified nucleotide
  modified_base 74: mod_base = OTHER; note = 2'-O-methyl modified nucleotide
  modified_base 75: mod_base = OTHER; note = 2'-O-methyl modified nucleotide
  modified_base 76: mod_base = OTHER; note = 2'-O-methyl modified nucleotide
  modified_base 77: mod_base = OTHER; note = 2'-O-methyl modified nucleotide
  modified_base 78: mod_base = OTHER; note = 2'-O-methyl modified nucleotide
  modified_base 79: mod_base = OTHER; note = 2'-O-methyl modified nucleotide
  modified_base 80: mod_base = OTHER; note = 2'-O-methyl modified nucleotide
  modified_base 81: mod_base = OTHER; note = 2'-O-methyl modified nucleotide
  modified_base 82: mod_base = OTHER; note = 2'-O-methyl modified nucleotide
  modified_base 83: mod_base = OTHER; note = 2'-O-methyl modified nucleotide
  modified_base 84: mod_base = OTHER; note = 2'-O-methyl modified nucleotide
  modified_base 85: mod_base = OTHER; note = 2'-O-methyl modified nucleotide
  modified_base 86: mod_base = OTHER; note = 2'-O-methyl modified nucleotide
  modified_base 87: mod_base = OTHER; note = 2'-O-methyl modified nucleotide
  modified_base 88: mod_base = OTHER; note = 2'-O-methyl modified nucleotide
  modified_base 89: mod_base = OTHER; note = 2'-O-methyl modified nucleotide
  modified_base 90: mod_base = OTHER; note = 2'-O-methyl modified nucleotide
  modified_base 91: mod_base = OTHER; note = 2'-O-methyl modified nucleotide
  modified_base 92: mod_base = OTHER; note = 2'-O-methyl modified nucleotide
  modified_base 93: mod_base = OTHER; note = 2'-O-methyl modified nucleotide
  modified_base 94: mod_base = OTHER; note = 2'-O-methyl modified nucleotide
  modified_base 95: mod_base = OTHER; note = 2'-O-methyl modified nucleotide
  modified_base 96: mod_base = OTHER; note = 2'-O-methyl modified nucleotide
  modified_base 124: mod_base = OTHER; note = Nucleotide with phosphorothioate linkage
  modified_base 125: mod_base = OTHER; note = 2'-O-methyl modified nucleotide with phosphorothioate linkage
  modified_base 126: mod_base = OTHER; note = 2'-O-methyl modified nucleotide with phosphorothioate linkage
  modified_base 127: mod_base = OTHER; note = 2'-O-methyl modified nucleotide
gagtagcgcgagcacagctagttttagagctagaaatagcaagttaaaataaggctagtccgttatcaacttgaaaaagtggcaccgagtcggtgcgctccgtggccttagtaacctgtgctcgcgc

SEQ ID NO: 17759 - RNA, 126 nt, synthetic construct
  source 1..126: mol_type = other RNA
  modified_base 1: mod_base = OTHER; note = 2'-O-methyl modified nucleotide with phosphorothioate linkage
  modified_base 2: mod_base = OTHER; note = 2'-O-methyl modified nucleotide with phosphorothioate linkage
  modified_base 3: mod_base = OTHER; note = 2'-O-methyl modified nucleotide with phosphorothioate linkage
  modified_base 29: mod_base = OTHER; note = 2'-O-methyl modified nucleotide
  modified_base 30: mod_base = OTHER; note = 2'-O-methyl modified nucleotide
  modified_base 31: mod_base = OTHER; note = 2'-O-methyl modified nucleotide
  modified_base 32: mod_base = OTHER; note = 2'-O-methyl modified nucleotide
  modified_base 33: mod_base = OTHER; note = 2'-O-methyl modified nucleotide
  modified_base 34: mod_base = OTHER; note = 2'-O-methyl modified nucleotide
  modified_base 35: mod_base = OTHER; note = 2'-O-methyl modified nucleotide
  modified_base 36: mod_base = OTHER; note = 2'-O-methyl modified nucleotide
  modified_base 37: mod_base = OTHER; note = 2'-O-methyl modified nucleotide
  modified_base 38: mod_base = OTHER; note = 2'-O-methyl modified nucleotide
  modified_base 39: mod_base = OTHER; note = 2'-O-methyl modified nucleotide
  modified_base 40: mod_base = OTHER; note = 2'-O-methyl modified nucleotide
  modified_base 69: mod_base = OTHER; note = 2'-O-methyl modified nucleotide
  modified_base 70: mod_base = OTHER; note = 2'-O-methyl modified nucleotide
  modified_base 71: mod_base = OTHER; note = 2'-O-methyl modified nucleotide
  modified_base 72: mod_base = OTHER; note = 2'-O-methyl modified nucleotide
  modified_base 73: mod_base = OTHER; note = 2'-O-methyl modified nucleotide
  modified_base 74: mod_base = OTHER; note = 2'-O-methyl modified nucleotide
  modified_base 75: mod_base = OTHER; note = 2'-O-methyl modified nucleotide
  modified_base 76: mod_base = OTHER; note = 2'-O-methyl modified nucleotide
  modified_base 77: mod_base = OTHER; note = 2'-O-methyl modified nucleotide
  modified_base 78: mod_base = OTHER; note = 2'-O-methyl modified nucleotide
  modified_base 79: mod_base = OTHER; note = 2'-O-methyl modified nucleotide
  modified_base 80: mod_base = OTHER; note = 2'-O-methyl modified nucleotide
  modified_base 81: mod_base = OTHER; note = 2'-O-methyl modified nucleotide
  modified_base 82: mod_base = OTHER; note = 2'-O-methyl modified nucleotide
  modified_base 83: mod_base = OTHER; note = 2'-O-methyl modified nucleotide
  modified_base 84: mod_base = OTHER; note = 2'-O-methyl modified nucleotide
  modified_base 85: mod_base = OTHER; note = 2'-O-methyl modified nucleotide
  modified_base 86: mod_base = OTHER; note = 2'-O-methyl modified nucleotide
  modified_base 87: mod_base = OTHER; note = 2'-O-methyl modified nucleotide
  modified_base 88: mod_base = OTHER; note = 2'-O-methyl modified nucleotide
  modified_base 89: mod_base = OTHER; note = 2'-O-methyl modified nucleotide
  modified_base 90: mod_base = OTHER; note = 2'-O-methyl modified nucleotide
  modified_base 91: mod_base = OTHER; note = 2'-O-methyl modified nucleotide
  modified_base 92: mod_base = OTHER; note = 2'-O-methyl modified nucleotide
  modified_base 93: mod_base = OTHER; note = 2'-O-methyl modified nucleotide
  modified_base 94: mod_base = OTHER; note = 2'-O-methyl modified nucleotide
  modified_base 95: mod_base = OTHER; note = 2'-O-methyl modified nucleotide
  modified_base 96: mod_base = OTHER; note = 2'-O-methyl modified nucleotide
  modified_base 123: mod_base = OTHER; note = Nucleotide with phosphorothioate linkage
  modified_base 124: mod_base = OTHER; note = 2'-O-methyl modified nucleotide with phosphorothioate linkage
  modified_base 125: mod_base = OTHER; note = 2'-O-methyl modified nucleotide with phosphorothioate linkage
  modified_base 126: mod_base = OTHER; note = 2'-O-methyl modified nucleotide
gagtagcgcgagcacagctagttttagagctagaaatagcaagttaaaataaggctagtccgttatcaacttgaaaaagtggcaccgagtcggtgcgctccgtggccttagtaacctgtgctcgcg

SEQ ID NO: 17760 - RNA, 125 nt, synthetic construct
  source 1..125: mol_type = other RNA
  modified_base 1: mod_base = OTHER; note = 2'-O-methyl modified nucleotide with phosphorothioate linkage
  modified_base 2: mod_base = OTHER; note = 2'-O-methyl modified nucleotide with phosphorothioate linkage
  modified_base 3: mod_base = OTHER; note = 2'-O-methyl modified nucleotide with phosphorothioate linkage
  modified_base 29: mod_base = OTHER; note = 2'-O-methyl modified nucleotide
  modified_base 30: mod_base = OTHER; note = 2'-O-methyl modified nucleotide
  modified_base 31: mod_base = OTHER; note = 2'-O-methyl modified nucleotide
  modified_base 32: mod_base = OTHER; note = 2'-O-methyl modified nucleotide
  modified_base 33: mod_base = OTHER; note = 2'-O-methyl modified nucleotide
  modified_base 34: mod_base = OTHER; note = 2'-O-methyl modified nucleotide
  modified_base 35: mod_base = OTHER; note = 2'-O-methyl modified nucleotide
  modified_base 36: mod_base = OTHER; note = 2'-O-methyl modified nucleotide
  modified_base 37: mod_base = OTHER; note = 2'-O-methyl modified nucleotide
  modified_base 38: mod_base = OTHER; note = 2'-O-methyl modified nucleotide
  modified_base 39: mod_base = OTHER; note = 2'-O-methyl modified nucleotide
  modified_base 40: mod_base = OTHER; note = 2'-O-methyl modified nucleotide
  modified_base 69: mod_base = OTHER; note = 2'-O-methyl modified nucleotide
  modified_base 70: mod_base = OTHER; note = 2'-O-methyl modified nucleotide
  modified_base 71: mod_base = OTHER; note = 2'-O-methyl modified nucleotide
  modified_base 72: mod_base = OTHER; note = 2'-O-methyl modified nucleotide
  modified_base 73: mod_base = OTHER; note = 2'-O-methyl modified nucleotide
  modified_base 74: mod_base = OTHER; note = 2'-O-methyl modified nucleotide
  modified_base 75: mod_base = OTHER; note = 2'-O-methyl modified nucleotide
  modified_base 76: mod_base = OTHER; note = 2'-O-methyl modified nucleotide
  modified_base 77: mod_base = OTHER; note = 2'-O-methyl modified nucleotide
  modified_base 78: mod_base = OTHER; note = 2'-O-methyl modified nucleotide
  modified_base 79: mod_base = OTHER; note = 2'-O-methyl modified nucleotide
  modified_base 80: mod_base = OTHER; note = 2'-O-methyl modified nucleotide
  modified_base 81: mod_base = OTHER; note = 2'-O-methyl modified nucleotide
  modified_base 82: mod_base = OTHER; note = 2'-O-methyl modified nucleotide
  modified_base 83: mod_base = OTHER; note = 2'-O-methyl modified nucleotide
  modified_base 84: mod_base = OTHER; note = 2'-O-methyl modified nucleotide
  modified_base 85: mod_base = OTHER; note = 2'-O-methyl modified nucleotide
  modified_base 86: mod_base = OTHER; note = 2'-O-methyl modified nucleotide
  modified_base 87: mod_base = OTHER; note = 2'-O-methyl modified nucleotide
  modified_base 88: mod_base = OTHER; note = 2'-O-methyl modified nucleotide
  modified_base 89: mod_base = OTHER; note = 2'-O-methyl modified nucleotide
  modified_base 90: mod_base = OTHER; note = 2'-O-methyl modified nucleotide
  modified_base 91: mod_base = OTHER; note = 2'-O-methyl modified nucleotide
  modified_base 92: mod_base = OTHER; note = 2'-O-methyl modified nucleotide
  modified_base 93: mod_base = OTHER; note = 2'-O-methyl modified nucleotide
  modified_base 94: mod_base = OTHER; note = 2'-O-methyl modified nucleotide
  modified_base 95: mod_base = OTHER; note = 2'-O-methyl modified nucleotide
  modified_base 96: mod_base = OTHER; note = 2'-O-methyl modified nucleotide
  modified_base 122: mod_base = OTHER; note = Nucleotide with phosphorothioate linkage
  modified_base 123: mod_base = OTHER; note = 2'-O-methyl modified nucleotide with phosphorothioate linkage
  modified_base 124: mod_base = OTHER; note = 2'-O-methyl modified nucleotide with phosphorothioate linkage
  modified_base 125: mod_base = OTHER; note = 2'-O-methyl modified nucleotide
gagtagcgcgagcacagctagttttagagctagaaatagcaagttaaaataaggctagtccgttatcaacttgaaaaagtggcaccgagtcggtgcgctccgtggccttagtaacctgtgctcgc

SEQ ID NO: 17761 - RNA, 124 nt, synthetic construct
  source 1..124: mol_type = other RNA
  modified_base 1: mod_base = OTHER; note = 2'-O-methyl modified nucleotide with phosphorothioate linkage
  modified_base 2: mod_base = OTHER; note = 2'-O-methyl modified nucleotide with phosphorothioate linkage
  modified_base 3: mod_base = OTHER; note = 2'-O-methyl modified nucleotide with phosphorothioate linkage
  modified_base 29: mod_base = OTHER; note = 2'-O-methyl modified nucleotide
  modified_base 30: mod_base = OTHER; note = 2'-O-methyl modified nucleotide
  modified_base 31: mod_base = OTHER; note = 2'-O-methyl modified nucleotide
  modified_base 32: mod_base = OTHER; note = 2'-O-methyl modified nucleotide
  modified_base 33: mod_base = OTHER; note = 2'-O-methyl modified nucleotide
  modified_base 34: mod_base = OTHER; note = 2'-O-methyl modified nucleotide
  modified_base 35: mod_base = OTHER; note = 2'-O-methyl modified nucleotide
  modified_base 36: mod_base = OTHER; note = 2'-O-methyl modified nucleotide
  modified_base 37: mod_base = OTHER; note = 2'-O-methyl modified nucleotide
  modified_base 38: mod_base = OTHER; note = 2'-O-methyl modified nucleotide
  modified_base 39: mod_base = OTHER; note = 2'-O-methyl modified nucleotide
  modified_base 40: mod_base = OTHER; note = 2'-O-methyl modified nucleotide
  modified_base 69: mod_base = OTHER; note = 2'-O-methyl modified nucleotide
  modified_base 70: mod_base = OTHER; note = 2'-O-methyl modified nucleotide
  modified_base 71: mod_base = OTHER; note = 2'-O-methyl modified nucleotide
  modified_base 72: mod_base = OTHER; note = 2'-O-methyl modified nucleotide
  modified_base 73: mod_base = OTHER; note = 2'-O-methyl modified nucleotide
  modified_base 74: mod_base = OTHER; note = 2'-O-methyl modified nucleotide
  modified_base 75: mod_base = OTHER; note = 2'-O-methyl modified nucleotide
  modified_base 76: mod_base = OTHER; note = 2'-O-methyl modified nucleotide
  modified_base 77: mod_base = OTHER; note = 2'-O-methyl modified nucleotide
  modified_base 78: mod_base = OTHER; note = 2'-O-methyl modified nucleotide
  modified_base 79: mod_base = OTHER; note = 2'-O-methyl modified nucleotide
  modified_base 80: mod_base = OTHER; note = 2'-O-methyl modified nucleotide
  modified_base 81: mod_base = OTHER; note = 2'-O-methyl modified nucleotide
  modified_base 82: mod_base = OTHER; note = 2'-O-methyl modified nucleotide
  modified_base 83: mod_base = OTHER; note = 2'-O-methyl modified nucleotide
  modified_base 84: mod_base = OTHER; note = 2'-O-methyl modified nucleotide
  modified_base 85: mod_base = OTHER; note = 2'-O-methyl modified nucleotide
  modified_base 86: mod_base = OTHER; note = 2'-O-methyl modified nucleotide
  modified_base 87: mod_base = OTHER; note = 2'-O-methyl modified nucleotide
  modified_base 88: mod_base = OTHER; note = 2'-O-methyl modified nucleotide
  modified_base 89: mod_base = OTHER; note = 2'-O-methyl modified nucleotide
  modified_base 90: mod_base = OTHER; note = 2'-O-methyl modified nucleotide
  modified_base 91: mod_base = OTHER; note = 2'-O-methyl modified nucleotide
  modified_base 92: mod_base = OTHER; note = 2'-O-methyl modified nucleotide
  modified_base 93: mod_base = OTHER; note = 2'-O-methyl modified nucleotide
  modified_base 94: mod_base = OTHER; note = 2'-O-methyl modified nucleotide
  modified_base 95: mod_base = OTHER; note = 2'-O-methyl modified nucleotide
  modified_base 96: mod_base = OTHER; note = 2'-O-methyl modified nucleotide
  modified_base 121: mod_base = OTHER; note = Nucleotide with phosphorothioate linkage
  modified_base 122: mod_base = OTHER; note = 2'-O-methyl modified nucleotide with phosphorothioate linkage
  modified_base 123: mod_base = OTHER; note = 2'-O-methyl modified nucleotide with phosphorothioate linkage
  modified_base 124: mod_base = OTHER; note = 2'-O-methyl modified nucleotide
gagtagcgcgagcacagctagttttagagctagaaatagcaagttaaaataaggctagtccgttatcaacttgaaaaagtggcaccgagtcggtgcgctccgtggccttagtaacctgtgctcg

SEQ ID NO: 17762 - RNA, 123 nt, synthetic construct
  source 1..123: mol_type = other RNA
  modified_base 1: mod_base = OTHER; note = 2'-O-methyl modified nucleotide with phosphorothioate linkage
  modified_base 2: mod_base = OTHER; note = 2'-O-methyl modified nucleotide with phosphorothioate linkage
  modified_base 3: mod_base = OTHER; note = 2'-O-methyl modified nucleotide with phosphorothioate linkage
  modified_base 29: mod_base = OTHER; note = 2'-O-methyl modified nucleotide
  modified_base 30: mod_base = OTHER; note = 2'-O-methyl modified nucleotide
  modified_base 31: mod_base = OTHER; note = 2'-O-methyl modified nucleotide
  modified_base 32: mod_base = OTHER; note = 2'-O-methyl modified nucleotide
  modified_base 33: mod_base = OTHER; note = 2'-O-methyl modified nucleotide
  modified_base 34: mod_base = OTHER; note = 2'-O-methyl modified nucleotide
  modified_base 35: mod_base = OTHER; note = 2'-O-methyl modified nucleotide
  modified_base 36: mod_base = OTHER; note = 2'-O-methyl modified nucleotide
  modified_base 37: mod_base = OTHER; note = 2'-O-methyl modified nucleotide
  modified_base 38: mod_base = OTHER; note = 2'-O-methyl modified nucleotide
  modified_base 39: mod_base = OTHER; note = 2'-O-methyl modified nucleotide
  modified_base 40: mod_base = OTHER; note = 2'-O-methyl modified nucleotide
  modified_base 69: mod_base = OTHER; note = 2'-O-methyl modified nucleotide
  modified_base 70: mod_base = OTHER; note = 2'-O-methyl modified nucleotide
  modified_base 71: mod_base = OTHER; note = 2'-O-methyl modified nucleotide
  modified_base 72: mod_base = OTHER; note = 2'-O-methyl modified nucleotide
  modified_base 73: mod_base = OTHER; note = 2'-O-methyl modified nucleotide
  modified_base 74: mod_base = OTHER; note = 2'-O-methyl modified nucleotide
  modified_base 75: mod_base = OTHER; note = 2'-O-methyl modified nucleotide
  modified_base 76: mod_base = OTHER; note = 2'-O-methyl modified nucleotide
  modified_base 77: mod_base = OTHER; note = 2'-O-methyl modified nucleotide
  modified_base 78: mod_base = OTHER; note = 2'-O-methyl modified nucleotide
  modified_base 79: mod_base = OTHER; note = 2'-O-methyl modified nucleotide
  modified_base 80: mod_base = OTHER; note = 2'-O-methyl modified nucleotide
  modified_base 81: mod_base = OTHER; note = 2'-O-methyl modified nucleotide
  modified_base 82: mod_base = OTHER; note = 2'-O-methyl modified nucleotide
  modified_base 83: mod_base = OTHER; note = 2'-O-methyl modified nucleotide
  modified_base 84: mod_base = OTHER; note = 2'-O-methyl modified nucleotide
  modified_base 85: mod_base = OTHER; note = 2'-O-methyl modified nucleotide
  modified_base 86: mod_base = OTHER; note = 2'-O-methyl modified nucleotide
  modified_base 87: mod_base = OTHER; note = 2'-O-methyl modified nucleotide
  modified_base 88: mod_base = OTHER; note = 2'-O-methyl modified nucleotide
  modified_base 89: mod_base = OTHER; note = 2'-O-methyl modified nucleotide
  modified_base 90: mod_base = OTHER; note = 2'-O-methyl modified nucleotide
  modified_base 91: mod_base = OTHER; note = 2'-O-methyl modified nucleotide
  modified_base 92: mod_base = OTHER; note = 2'-O-methyl modified nucleotide
  modified_base 93: mod_base = OTHER; note = 2'-O-methyl modified nucleotide
  modified_base 94: mod_base = OTHER; note = 2'-O-methyl modified nucleotide
  modified_base 95: mod_base = OTHER; note = 2'-O-methyl modified nucleotide
  modified_base 96: mod_base = OTHER; note = 2'-O-methyl modified nucleotide
  modified_base 120: mod_base = OTHER; note = Nucleotide with phosphorothioate linkage
  modified_base 121: mod_base = OTHER; note = 2'-O-methyl modified nucleotide with phosphorothioate linkage
  modified_base 122: mod_base = OTHER; note = 2'-O-methyl modified nucleotide with phosphorothioate linkage
  modified_base 123: mod_base = OTHER; note = 2'-O-methyl modified nucleotide
gagtagcgcgagcacagctagttttagagctagaaatagcaagttaaaataaggctagtccgttatcaacttgaaaaagtggcaccgagtcggtgcgctccgtggccttagtaacctgtgctc

SEQ ID NO: 17763 - RNA, 130 nt, synthetic construct
  source 1..130: mol_type = other RNA
  modified_base 1: mod_base = OTHER; note = 2'-O-methyl modified nucleotide with phosphorothioate linkage
  modified_base 2: mod_base = OTHER; note = 2'-O-methyl modified nucleotide with phosphorothioate linkage
  modified_base 3: mod_base = OTHER; note = 2'-O-methyl modified nucleotide with phosphorothioate linkage
  modified_base 29: mod_base = OTHER; note = 2'-O-methyl modified nucleotide
  modified_base 30: mod_base = OTHER; note = 2'-O-methyl modified nucleotide
  modified_base 31: mod_base = OTHER; note = 2'-O-methyl modified nucleotide
  modified_base 32: mod_base = OTHER; note = 2'-O-methyl modified nucleotide
  modified_base 33: mod_base = OTHER; note = 2'-O-methyl modified nucleotide
  modified_base 34: mod_base = OTHER; note = 2'-O-methyl modified nucleotide
  modified_base 35: mod_base = OTHER; note = 2'-O-methyl modified nucleotide
  modified_base 36: mod_base = OTHER; note = 2'-O-methyl modified nucleotide
  modified_base 37: mod_base = OTHER; note = 2'-O-methyl modified nucleotide
  modified_base 38: mod_base = OTHER; note = 2'-O-methyl modified nucleotide
  modified_base 39: mod_base = OTHER; note = 2'-O-methyl modified nucleotide
  modified_base 40: mod_base = OTHER; note = 2'-O-methyl modified nucleotide
  modified_base 69: mod_base = OTHER; note = 2'-O-methyl modified nucleotide
  modified_base 70: mod_base = OTHER; note = 2'-O-methyl modified nucleotide
  modified_base 71: mod_base = OTHER; note = 2'-O-methyl modified nucleotide
  modified_base 72: mod_base = OTHER; note = 2'-O-methyl modified nucleotide
  modified_base 73: mod_base = OTHER; note = 2'-O-methyl modified nucleotide
  modified_base 74: mod_base = OTHER; note = 2'-O-methyl modified nucleotide
  modified_base 75: mod_base = OTHER; note = 2'-O-methyl modified nucleotide
  modified_base 76: mod_base = OTHER; note = 2'-O-methyl modified nucleotide
  modified_base 77: mod_base = OTHER; note = 2'-O-methyl modified nucleotide
  modified_base 78: mod_base = OTHER; note = 2'-O-methyl modified nucleotide
  modified_base 79: mod_base = OTHER; note = 2'-O-methyl modified nucleotide
  modified_base 80: mod_base = OTHER; note = 2'-O-methyl modified nucleotide
  modified_base 81: mod_base = OTHER; note = 2'-O-methyl modified nucleotide
  modified_base 82: mod_base = OTHER; note = 2'-O-methyl modified nucleotide
  modified_base 83: mod_base = OTHER; note = 2'-O-methyl modified nucleotide
  modified_base 84: mod_base = OTHER; note = 2'-O-methyl modified nucleotide
  modified_base 85: mod_base = OTHER; note = 2'-O-methyl modified nucleotide
  modified_base 86: mod_base = OTHER; note = 2'-O-methyl modified nucleotide
  modified_base 87: mod_base = OTHER; note = 2'-O-methyl modified nucleotide
  modified_base 88: mod_base = OTHER; note = 2'-O-methyl modified nucleotide
  modified_base 89: mod_base = OTHER; note = 2'-O-methyl modified nucleotide
  modified_base 90: mod_base = OTHER; note = 2'-O-methyl modified nucleotide
  modified_base 91: mod_base = OTHER; note = 2'-O-methyl modified nucleotide
  modified_base 92: mod_base = OTHER; note = 2'-O-methyl modified nucleotide
  modified_base 93: mod_base = OTHER; note = 2'-O-methyl modified nucleotide
  modified_base 94: mod_base = OTHER; note = 2'-O-methyl modified nucleotide
  modified_base 95: mod_base = OTHER; note = 2'-O-methyl modified nucleotide
  modified_base 96: mod_base = OTHER; note = 2'-O-methyl modified nucleotide
  modified_base 127: mod_base = OTHER; note = Nucleotide with phosphorothioate linkage
  modified_base 128: mod_base = OTHER; note = 2'-O-methyl modified nucleotide with phosphorothioate linkage
  modified_base 129: mod_base = OTHER; note = 2'-O-methyl modified nucleotide with phosphorothioate linkage
  modified_base 130: mod_base = OTHER; note = 2'-O-methyl modified nucleotide
gagtagcgcgagcacagctagttttagagctagaaatagcaagttaaaataaggctagtccgttatcaacttgaaaaagtggcaccgagtcggtgctcgctccgtggccttagtaacctgtgctcgcgct

SEQ ID NO: 17764 - RNA, 129 nt, synthetic construct
  source 1..129: mol_type = other RNA
  modified_base 1: mod_base = OTHER; note = 2'-O-methyl modified nucleotide with phosphorothioate linkage
  modified_base 2: mod_base = OTHER; note = 2'-O-methyl modified nucleotide with phosphorothioate linkage
  modified_base 3: mod_base = OTHER; note = 2'-O-methyl modified nucleotide with phosphorothioate linkage
  modified_base 29: mod_base = OTHER; note = 2'-O-methyl modified nucleotide
  modified_base 30: mod_base = OTHER; note = 2'-O-methyl modified nucleotide
  modified_base 31: mod_base = OTHER; note = 2'-O-methyl modified nucleotide
  modified_base 32: mod_base = OTHER; note = 2'-O-methyl modified nucleotide
  modified_base 33: mod_base = OTHER; note = 2'-O-methyl modified nucleotide
  modified_base 34: mod_base = OTHER; note = 2'-O-methyl modified nucleotide
  modified_base 35: mod_base = OTHER; note = 2'-O-methyl modified nucleotide
  modified_base 36: mod_base = OTHER; note = 2'-O-methyl modified nucleotide
  modified_base 37: mod_base = OTHER; note = 2'-O-methyl modified nucleotide
  modified_base 38: mod_base = OTHER; note = 2'-O-methyl modified nucleotide
  modified_base 39: mod_base = OTHER; note = 2'-O-methyl modified nucleotide
  modified_base 40: mod_base = OTHER; note = 2'-O-methyl modified nucleotide
  modified_base 69: mod_base = OTHER; note = 2'-O-methyl modified nucleotide
  modified_base 70: mod_base = OTHER; note = 2'-O-methyl modified nucleotide
  modified_base 71: mod_base = OTHER; note = 2'-O-methyl modified nucleotide
  modified_base 72: mod_base = OTHER; note = 2'-O-methyl modified nucleotide
  modified_base 73: mod_base = OTHER; note = 2'-O-methyl modified nucleotide
  modified_base 74: mod_base = OTHER; note = 2'-O-methyl modified nucleotide
  modified_base 75: mod_base = OTHER; note = 2'-O-methyl modified nucleotide
  modified_base 76: mod_base = OTHER; note = 2'-O-methyl modified nucleotide
  modified_base 77: mod_base = OTHER; note = 2'-O-methyl modified nucleotide
  modified_base 78: mod_base = OTHER; note = 2'-O-methyl modified nucleotide
  modified_base 79: mod_base = OTHER; note = 2'-O-methyl modified nucleotide
  modified_base 80: mod_base = OTHER; note = 2'-O-methyl modified nucleotide
  modified_base 81: mod_base = OTHER; note = 2'-O-methyl modified nucleotide
  modified_base 82: mod_base = OTHER; note = 2'-O-methyl modified nucleotide
  modified_base 83: mod_base = OTHER; note = 2'-O-methyl modified nucleotide
  modified_base 84: mod_base = OTHER; note = 2'-O-methyl modified nucleotide
  modified_base 85: mod_base = OTHER; note = 2'-O-methyl modified nucleotide
  modified_base 86: mod_base = OTHER; note = 2'-O-methyl modified nucleotide
  modified_base 87: mod_base = OTHER; note = 2'-O-methyl modified nucleotide
  modified_base 88: mod_base = OTHER; note = 2'-O-methyl modified nucleotide
  modified_base 89: mod_base = OTHER; note = 2'-O-methyl modified nucleotide
  modified_base 90: mod_base = OTHER; note = 2'-O-methyl modified nucleotide
  modified_base 91: mod_base = OTHER; note = 2'-O-methyl modified nucleotide
  modified_base 92: mod_base = OTHER; note = 2'-O-methyl modified nucleotide
  modified_base 93: mod_base = OTHER; note = 2'-O-methyl modified nucleotide
  modified_base 94: mod_base = OTHER; note = 2'-O-methyl modified nucleotide
  modified_base 95: mod_base = OTHER; note = 2'-O-methyl modified nucleotide
  modified_base 96: mod_base = OTHER; note = 2'-O-methyl modified nucleotide
  modified_base 126: mod_base = OTHER; note = Nucleotide with phosphorothioate linkage
  modified_base 127: mod_base = OTHER; note = 2'-O-methyl modified nucleotide with phosphorothioate linkage
  modified_base 128: mod_base = OTHER; note = 2'-O-methyl modified nucleotide with phosphorothioate linkage
  modified_base 129: mod_base = OTHER; note = 2'-O-methyl modified nucleotide
gagtagcgcgagcacagctagttttagagctagaaatagcaagttaaaataaggctagtccgttatcaacttgaaaaagtggcaccgagtcggtgctcgctccgtggccttagtaacctgtgctcgcgc

SEQ ID NO: 17765 - RNA, 128 nt, synthetic construct
  source 1..128: mol_type = other RNA
  modified_base 1: mod_base = OTHER; note = 2'-O-methyl modified nucleotide with phosphorothioate linkage
  modified_base 2: mod_base = OTHER; note = 2'-O-methyl modified nucleotide with phosphorothioate linkage
  modified_base 3: mod_base = OTHER; note = 2'-O-methyl modified nucleotide with phosphorothioate linkage
  modified_base 29: mod_base = OTHER; note = 2'-O-methyl modified nucleotide
  modified_base 30: mod_base = OTHER; note = 2'-O-methyl modified nucleotide
  modified_base 31: mod_base = OTHER; note = 2'-O-methyl modified nucleotide
  modified_base 32: mod_base = OTHER; note = 2'-O-methyl modified nucleotide
  modified_base 33: mod_base = OTHER; note = 2'-O-methyl modified nucleotide
  modified_base 34: mod_base = OTHER; note = 2'-O-methyl modified nucleotide
  modified_base 35: mod_base = OTHER; note = 2'-O-methyl modified nucleotide
  modified_base 36: mod_base = OTHER; note = 2'-O-methyl modified nucleotide
  modified_base 37: mod_base = OTHER; note = 2'-O-methyl modified nucleotide
  modified_base 38: mod_base = OTHER; note = 2'-O-methyl modified nucleotide
  modified_base 39: mod_base = OTHER; note = 2'-O-methyl modified nucleotide
  modified_base 40: mod_base = OTHER; note = 2'-O-methyl modified nucleotide
  modified_base 69: mod_base = OTHER; note = 2'-O-methyl modified nucleotide
  modified_base 70: mod_base = OTHER; note = 2'-O-methyl modified nucleotide
  modified_base 71: mod_base = OTHER; note = 2'-O-methyl modified nucleotide
  modified_base 72: mod_base = OTHER; note = 2'-O-methyl modified nucleotide
  modified_base 73: mod_base = OTHER; note = 2'-O-methyl modified nucleotide
  modified_base 74: mod_base = OTHER; note = 2'-O-methyl modified nucleotide
  modified_base 75: mod_base = OTHER; note = 2'-O-methyl modified nucleotide
  modified_base 76: mod_base = OTHER; note = 2'-O-methyl modified nucleotide
  modified_base 77: mod_base = OTHER; note = 2'-O-methyl modified nucleotide
  modified_base 78: mod_base = OTHER; note = 2'-O-methyl modified nucleotide
  modified_base 79: mod_base = OTHER; note = 2'-O-methyl modified nucleotide
  modified_base 80: mod_base = OTHER; note = 2'-O-methyl modified nucleotide
  modified_base 81: mod_base = OTHER; note = 2'-O-methyl modified nucleotide
  modified_base 82: mod_base = OTHER; note = 2'-O-methyl modified nucleotide
  modified_base 83: mod_base = OTHER; note = 2'-O-methyl modified nucleotide
  modified_base 84: mod_base = OTHER; note = 2'-O-methyl modified nucleotide
  modified_base 85: mod_base = OTHER; note = 2'-O-methyl modified nucleotide
  modified_base 86: mod_base = OTHER; note = 2'-O-methyl modified nucleotide
  modified_base 87: mod_base = OTHER; note = 2'-O-methyl modified nucleotide
  modified_base 88: mod_base = OTHER; note = 2'-O-methyl modified nucleotide
  modified_base 89: mod_base = OTHER; note = 2'-O-methyl modified nucleotide
  modified_base 90: mod_base = OTHER; note = 2'-O-methyl modified nucleotide
  modified_base 91: mod_base = OTHER; note = 2'-O-methyl modified nucleotide
  modified_base 92: mod_base = OTHER; note = 2'-O-methyl modified nucleotide
  modified_base 93: mod_base = OTHER; note = 2'-O-methyl modified nucleotide
  modified_base 94: mod_base = OTHER; note = 2'-O-methyl modified nucleotide
  modified_base 95: mod_base = OTHER; note = 2'-O-methyl modified nucleotide
  modified_base 96: mod_base = OTHER; note = 2'-O-methyl modified nucleotide
  modified_base 125: mod_base = OTHER; note = Nucleotide with phosphorothioate linkage
  modified_base 126: mod_base = OTHER; note = 2'-O-methyl modified nucleotide with phosphorothioate linkage
  modified_base 127: mod_base = OTHER; note = 2'-O-methyl modified nucleotide with phosphorothioate linkage
  modified_base 128: mod_base = OTHER; note = 2'-O-methyl modified nucleotide
gagtagcgcgagcacagctagttttagagctagaaatagcaagttaaaataaggctagtccgttatcaacttgaaaaagtggcaccgagtcggtgctcgctccgtggccttagtaacctgtgctcgcg

SEQ ID NO: 17766 - RNA, 127 nt, synthetic construct
  source 1..127: mol_type = other RNA
  modified_base 1: mod_base = OTHER; note = 2'-O-methyl modified nucleotide with phosphorothioate linkage
  modified_base 2: mod_base = OTHER; note = 2'-O-methyl modified nucleotide with phosphorothioate linkage
  modified_base 3: mod_base = OTHER; note = 2'-O-methyl modified nucleotide with phosphorothioate linkage
  modified_base 29: mod_base = OTHER; note = 2'-O-methyl modified nucleotide
  modified_base 30: mod_base = OTHER; note = 2'-O-methyl modified nucleotide
  modified_base 31: mod_base = OTHER; note = 2'-O-methyl modified nucleotide
  modified_base 32: mod_base = OTHER; note = 2'-O-methyl modified nucleotide
  modified_base 33: mod_base = OTHER; note = 2'-O-methyl modified nucleotide
  modified_base 34: mod_base = OTHER; note = 2'-O-methyl modified nucleotide
  modified_base 35: mod_base = OTHER; note = 2'-O-methyl modified nucleotide
  modified_base 36: mod_base = OTHER; note = 2'-O-methyl modified nucleotide
  modified_base 37: mod_base = OTHER; note = 2'-O-methyl modified nucleotide
  modified_base 38: mod_base = OTHER; note = 2'-O-methyl modified nucleotide
  modified_base 39: mod_base = OTHER; note = 2'-O-methyl modified nucleotide
  modified_base 40: mod_base = OTHER; note = 2'-O-methyl modified nucleotide
  modified_base 69: mod_base = OTHER; note = 2'-O-methyl modified nucleotide
  modified_base 70: mod_base = OTHER; note = 2'-O-methyl modified nucleotide
  modified_base 71: mod_base = OTHER; note = 2'-O-methyl modified nucleotide
  modified_base 72: mod_base = OTHER; note = 2'-O-methyl modified nucleotide
  modified_base 73: mod_base = OTHER; note = 2'-O-methyl modified nucleotide
  modified_base 74: mod_base = OTHER; note = 2'-O-methyl modified nucleotide
  modified_base 75: mod_base = OTHER; note = 2'-O-methyl modified nucleotide
  modified_base 76: mod_base = OTHER; note = 2'-O-methyl modified nucleotide
  modified_base 77: mod_base = OTHER; note = 2'-O-methyl modified nucleotide
  modified_base 78: mod_base = OTHER; note = 2'-O-methyl modified nucleotide
  modified_base 79: mod_base = OTHER; note = 2'-O-methyl modified nucleotide
  modified_base 80: mod_base = OTHER; note = 2'-O-methyl modified nucleotide
  modified_base 81: mod_base = OTHER; note = 2'-O-methyl modified nucleotide
  modified_base 82: mod_base = OTHER; note = 2'-O-methyl modified nucleotide
  modified_base 83: mod_base = OTHER; note = 2'-O-methyl modified nucleotide
  modified_base 84: mod_base = OTHER; note = 2'-O-methyl modified nucleotide
  modified_base 85: mod_base = OTHER; note = 2'-O-methyl modified nucleotide
  modified_base 86: mod_base = OTHER; note = 2'-O-methyl modified nucleotide
  modified_base 87: mod_base = OTHER; note = 2'-O-methyl modified nucleotide
  modified_base 88: mod_base = OTHER; note = 2'-O-methyl modified nucleotide
  modified_base 89: mod_base = OTHER; note = 2'-O-methyl modified nucleotide
  modified_base 90: mod_base = OTHER; note = 2'-O-methyl modified nucleotide
  modified_base 91: mod_base = OTHER; note = 2'-O-methyl modified nucleotide
  modified_base 92: mod_base = OTHER; note = 2'-O-methyl modified nucleotide
  modified_base 93: mod_base = OTHER; note = 2'-O-methyl modified nucleotide
  modified_base 94: mod_base = OTHER; note = 2'-O-methyl modified nucleotide
  modified_base 95: mod_base = OTHER; note = 2'-O-methyl modified nucleotide
  modified_base 96: mod_base = OTHER; note = 2'-O-methyl modified nucleotide
  modified_base 124: mod_base = OTHER; note = Nucleotide with phosphorothioate linkage
  modified_base 125: mod_base = OTHER; note = 2'-O-methyl modified nucleotide with phosphorothioate linkage
  modified_base 126: mod_base = OTHER; note = 2'-O-methyl modified nucleotide with phosphorothioate linkage
  modified_base 127: mod_base = OTHER; note = 2'-O-methyl modified nucleotide
gagtagcgcgagcacagctagttttagagctagaaatagcaagttaaaataaggctagtccgttatcaacttgaaaaagtggcaccgagtcggtgctcgctccgtggccttagtaacctgtgctcgc

SEQ ID NO: 17767 - RNA, 126 nt, synthetic construct
  source 1..126: mol_type = other RNA
  modified_base 1: mod_base = OTHER; note = 2'-O-methyl modified nucleotide with phosphorothioate linkage
  modified_base 2: mod_base = OTHER; note = 2'-O-methyl modified nucleotide with phosphorothioate linkage
  modified_base 3: mod_base = OTHER; note = 2'-O-methyl modified nucleotide with phosphorothioate linkage
  modified_base 29: mod_base = OTHER; note = 2'-O-methyl modified nucleotide
  modified_base 30: mod_base = OTHER; note = 2'-O-methyl modified nucleotide
  modified_base 31: mod_base = OTHER; note = 2'-O-methyl modified nucleotide
  modified_base 32: mod_base = OTHER; note = 2'-O-methyl modified nucleotide
  modified_base 33: mod_base = OTHER; note = 2'-O-methyl modified nucleotide
  modified_base 34: mod_base = OTHER; note = 2'-O-methyl modified nucleotide
  modified_base 35: mod_base = OTHER; note = 2'-O-methyl modified nucleotide
  modified_base 36: mod_base = OTHER; note = 2'-O-methyl modified nucleotide
  modified_base 37: mod_base = OTHER; note = 2'-O-methyl modified nucleotide
  modified_base 38: mod_base = OTHER; note = 2'-O-methyl modified nucleotide
  modified_base 39: mod_base = OTHER; note = 2'-O-methyl modified nucleotide
  modified_base 40: mod_base = OTHER; note = 2'-O-methyl modified nucleotide
  modified_base 69: mod_base = OTHER; note = 2'-O-methyl modified nucleotide
  modified_base 70: mod_base = OTHER; note = 2'-O-methyl modified nucleotide
  modified_base 71: mod_base = OTHER; note = 2'-O-methyl modified nucleotide
  modified_base 72: mod_base = OTHER; note = 2'-O-methyl modified nucleotide
  modified_base 73: mod_base = OTHER; note = 2'-O-methyl modified nucleotide
  modified_base 74: mod_base = OTHER; note = 2'-O-methyl modified nucleotide
  modified_base 75: mod_base = OTHER; note = 2'-O-methyl modified nucleotide
  modified_base 76: mod_base = OTHER; note = 2'-O-methyl modified nucleotide
  modified_base 77: mod_base = OTHER; note = 2'-O-methyl modified nucleotide
  modified_base 78: mod_base = OTHER; note = 2'-O-methyl modified nucleotide
  modified_base 79: mod_base = OTHER; note = 2'-O-methyl modified nucleotide
  modified_base 80: mod_base = OTHER; note = 2'-O-methyl modified nucleotide
  modified_base 81: mod_base = OTHER; note = 2'-O-methyl modified nucleotide
  modified_base 82: mod_base = OTHER; note = 2'-O-methyl modified nucleotide
  modified_base 83: mod_base = OTHER; note = 2'-O-methyl modified nucleotide
  modified_base 84: mod_base = OTHER; note = 2'-O-methyl modified nucleotide
  modified_base 85: mod_base = OTHER; note = 2'-O-methyl modified nucleotide
  modified_base 86: mod_base = OTHER; note = 2'-O-methyl modified nucleotide
  modified_base 87: mod_base = OTHER; note = 2'-O-methyl modified nucleotide
  modified_base 88: mod_base = OTHER; note = 2'-O-methyl modified nucleotide
  modified_base 89: mod_base = OTHER; note = 2'-O-methyl modified nucleotide
  modified_base 90: mod_base = OTHER; note = 2'-O-methyl modified nucleotide
  modified_base 91: mod_base = OTHER; note = 2'-O-methyl modified nucleotide
  modified_base 92: mod_base = OTHER; note = 2'-O-methyl modified nucleotide
  modified_base 93: mod_base = OTHER; note = 2'-O-methyl modified nucleotide
  modified_base 94: mod_base = OTHER; note = 2'-O-methyl modified nucleotide
  modified_base 95: mod_base = OTHER; note = 2'-O-methyl modified nucleotide
  modified_base 96: mod_base = OTHER; note = 2'-O-methyl modified nucleotide
  modified_base 123: mod_base = OTHER; note = Nucleotide with phosphorothioate linkage
  modified_base 124: mod_base = OTHER; note = 2'-O-methyl modified nucleotide with phosphorothioate linkage
  modified_base 125: mod_base = OTHER; note = 2'-O-methyl modified nucleotide with phosphorothioate linkage
  modified_base 126: mod_base = OTHER; note = 2'-O-methyl modified nucleotide
gagtagcgcgagcacagctagttttagagctagaaatagcaagttaaaataaggctagtccgttatcaacttgaaaaagtggcaccgagtcggtgctcgctccgtggccttagtaacctgtgctcg

SEQ ID NO: 17768 - RNA, 125 nt, synthetic construct
  source 1..125: mol_type = other RNA
  modified_base 1: mod_base = OTHER; note = 2'-O-methyl modified nucleotide with phosphorothioate linkage
  modified_base 2: mod_base = OTHER; note = 2'-O-methyl modified nucleotide with phosphorothioate linkage
  modified_base 3: mod_base = OTHER; note = 2'-O-methyl modified nucleotide with phosphorothioate linkage
  modified_base 29: mod_base = OTHER; note = 2'-O-methyl modified nucleotide
  modified_base 30: mod_base = OTHER; note = 2'-O-methyl modified nucleotide
  modified_base 31: mod_base = OTHER; note = 2'-O-methyl modified nucleotide
  modified_base 32: mod_base = OTHER; note = 2'-O-methyl modified nucleotide
  modified_base 33: mod_base = OTHER; note = 2'-O-methyl modified nucleotide
  modified_base 34: mod_base = OTHER; note = 2'-O-methyl modified nucleotide
  modified_base 35: mod_base = OTHER; note = 2'-O-methyl modified nucleotide
  modified_base 36: mod_base = OTHER; note = 2'-O-methyl modified nucleotide
  modified_base 37: mod_base = OTHER; note = 2'-O-methyl modified nucleotide
  modified_base 38: mod_base = OTHER; note = 2'-O-methyl modified nucleotide
  modified_base 39: mod_base = OTHER; note = 2'-O-methyl modified nucleotide
  modified_base 40: mod_base = OTHER; note = 2'-O-methyl modified nucleotide
  modified_base 69: mod_base = OTHER; note = 2'-O-methyl modified nucleotide
  modified_base 70: mod_base = OTHER; note = 2'-O-methyl modified nucleotide
  modified_base 71: mod_base = OTHER; note = 2'-O-methyl modified nucleotide
  modified_base 72: mod_base = OTHER; note = 2'-O-methyl modified nucleotide
  modified_base 73: mod_base = OTHER; note = 2'-O-methyl modified nucleotide
  modified_base 74: mod_base = OTHER; note = 2'-O-methyl modified nucleotide
  modified_base 75: mod_base = OTHER; note = 2'-O-methyl modified nucleotide
  modified_base 76: mod_base = OTHER; note = 2'-O-methyl modified nucleotide
  modified_base 77: mod_base = OTHER; note = 2'-O-methyl modified nucleotide
  modified_base 78: mod_base = OTHER; note = 2'-O-methyl modified nucleotide
  modified_base 79: mod_base = OTHER; note = 2'-O-methyl modified nucleotide
  modified_base 80: mod_base = OTHER; note = 2'-O-methyl modified nucleotide
  modified_base 81: mod_base = OTHER; note = 2'-O-methyl modified nucleotide
  modified_base 82: mod_base = OTHER; note = 2'-O-methyl modified nucleotide
  modified_base 83: mod_base = OTHER; note = 2'-O-methyl modified nucleotide
  modified_base 84: mod_base = OTHER; note = 2'-O-methyl modified nucleotide
  modified_base 85: mod_base = OTHER; note = 2'-O-methyl modified nucleotide
  modified_base 86: mod_base = OTHER; note = 2'-O-methyl modified nucleotide
  modified_base 87: mod_base = OTHER; note = 2'-O-methyl modified nucleotide
  modified_base 88: mod_base = OTHER; note = 2'-O-methyl modified nucleotide
  modified_base 89: mod_base = OTHER; note = 2'-O-methyl modified nucleotide
  modified_base 90: mod_base = OTHER; note = 2'-O-methyl modified nucleotide
  modified_base 91: mod_base = OTHER; note = 2'-O-methyl modified nucleotide
  modified_base 92: mod_base = OTHER; note = 2'-O-methyl modified nucleotide
  modified_base 93: mod_base = OTHER; note = 2'-O-methyl modified nucleotide
  modified_base 94: mod_base = OTHER; note = 2'-O-methyl modified nucleotide
  modified_base 95: mod_base = OTHER; note = 2'-O-methyl modified nucleotide
  modified_base 96: mod_base = OTHER; note = 2'-O-methyl modified nucleotide
  modified_base 122: mod_base = OTHER; note = Nucleotide with phosphorothioate linkage
  modified_base 123: mod_base = OTHER; note = 2'-O-methyl modified nucleotide with phosphorothioate linkage
  modified_base 124: mod_base = OTHER; note = 2'-O-methyl modified nucleotide with phosphorothioate linkage
  modified_base 125: mod_base = OTHER; note = 2'-O-methyl modified nucleotide
gagtagcgcgagcacagctagttttagagctagaaatagcaagttaaaataaggctagtccgttatcaacttgaaaaagtggcaccgagtcggtgctcgctccgtggccttagtaacctgtgctc

SEQ ID NO: 17769 - RNA, 132 nt, synthetic construct
  source 1..132: mol_type = other RNA
  modified_base 1: mod_base = OTHER; note = 2'-O-methyl modified nucleotide with phosphorothioate linkage
  modified_base 2: mod_base = OTHER; note = 2'-O-methyl modified nucleotide with phosphorothioate linkage
  modified_base 3: mod_base = OTHER; note = 2'-O-methyl modified nucleotide with phosphorothioate linkage
  modified_base 29: mod_base = OTHER; note = 2'-O-methyl modified nucleotide
  modified_base 30: mod_base = OTHER; note = 2'-O-methyl modified nucleotide
  modified_base 31: mod_base = OTHER; note = 2'-O-methyl modified nucleotide
  modified_base 32: mod_base = OTHER; note = 2'-O-methyl modified nucleotide
  modified_base 33: mod_base = OTHER; note = 2'-O-methyl modified nucleotide
  modified_base 34: mod_base = OTHER; note = 2'-O-methyl modified nucleotide
  modified_base 35: mod_base = OTHER; note = 2'-O-methyl modified nucleotide
  modified_base 36: mod_base = OTHER; note = 2'-O-methyl modified nucleotide
  modified_base 37: mod_base = OTHER; note = 2'-O-methyl modified nucleotide
  modified_base 38: mod_base = OTHER; note = 2'-O-methyl modified nucleotide
  modified_base 39: mod_base = OTHER; note = 2'-O-methyl modified nucleotide
  modified_base 40: mod_base = OTHER; note = 2'-O-methyl modified nucleotide
  modified_base 69: mod_base = OTHER; note = 2'-O-methyl modified nucleotide
  modified_base 70: mod_base = OTHER; note = 2'-O-methyl modified nucleotide
  modified_base 71: mod_base = OTHER; note = 2'-O-methyl modified nucleotide
  modified_base 72: mod_base = OTHER; note = 2'-O-methyl modified nucleotide
  modified_base 73: mod_base = OTHER; note = 2'-O-methyl modified nucleotide
  modified_base 74: mod_base = OTHER; note = 2'-O-methyl modified nucleotide
  modified_base 75: mod_base = OTHER; note = 2'-O-methyl modified nucleotide
  modified_base 76: mod_base = OTHER; note = 2'-O-methyl modified nucleotide
  modified_base 77: mod_base = OTHER; note = 2'-O-methyl modified nucleotide
  modified_base 78: mod_base = OTHER; note = 2'-O-methyl modified nucleotide
  modified_base 79: mod_base = OTHER; note = 2'-O-methyl modified nucleotide
  modified_base 80: mod_base = OTHER; note = 2'-O-methyl modified nucleotide
  modified_base 81: mod_base = OTHER; note = 2'-O-methyl modified nucleotide
  modified_base 82: mod_base = OTHER; note = 2'-O-methyl modified nucleotide
  modified_base 83: mod_base = OTHER; note = 2'-O-methyl modified nucleotide
  modified_base 84: mod_base = OTHER; note = 2'-O-methyl modified nucleotide
  modified_base 85: mod_base = OTHER; note = 2'-O-methyl modified nucleotide
  modified_base 86: mod_base = OTHER; note = 2'-O-methyl modified nucleotide
  modified_base 87: mod_base = OTHER; note = 2'-O-methyl modified nucleotide
  modified_base 88: mod_base = OTHER; note = 2'-O-methyl modified nucleotide
  modified_base 89: mod_base = OTHER; note = 2'-O-methyl modified nucleotide
  modified_base 90: mod_base = OTHER; note = 2'-O-methyl modified nucleotide
  modified_base 91: mod_base = OTHER; note = 2'-O-methyl modified nucleotide
  modified_base 92: mod_base = OTHER; note = 2'-O-methyl modified nucleotide
  modified_base 93: mod_base = OTHER; note = 2'-O-methyl modified nucleotide
  modified_base 94: mod_base = OTHER; note = 2'-O-methyl modified nucleotide
  modified_base 95: mod_base = OTHER; note = 2'-O-methyl modified nucleotide
  modified_base 96: mod_base = OTHER; note = 2'-O-methyl modified nucleotide
  modified_base 129: mod_base = OTHER; note = Nucleotide with phosphorothioate linkage
  modified_base 130: mod_base = OTHER; note = 2'-O-methyl modified nucleotide with phosphorothioate linkage
  modified_base 131: mod_base = OTHER; note = 2'-O-methyl modified nucleotide with phosphorothioate linkage
  modified_base 132: mod_base = OTHER; note = 2'-O-methyl modified nucleotide
gagtagcgcgagcacagctagttttagagctagaaatagcaagttaaaataaggctagtccgttatcaacttgaaaaagtggcaccgagtcggtgctctcgctccgtggccttagtaacctgtgctcgcgct

SEQ ID NO: 17770 - RNA, 131 nt, synthetic construct
  source 1..131: mol_type = other RNA
  modified_base 1: mod_base = OTHER; note = 2'-O-methyl modified nucleotide with phosphorothioate linkage
  modified_base 2: mod_base = OTHER; note = 2'-O-methyl modified nucleotide with phosphorothioate linkage
  modified_base 3: mod_base = OTHER; note = 2'-O-methyl modified nucleotide with phosphorothioate linkage
  modified_base 29: mod_base = OTHER; note = 2'-O-methyl modified nucleotide
  modified_base 30: mod_base = OTHER; note = 2'-O-methyl modified nucleotide
  modified_base 31: mod_base = OTHER; note = 2'-O-methyl modified nucleotide
  modified_base 32: mod_base = OTHER; note = 2'-O-methyl modified nucleotide
  modified_base 33: mod_base = OTHER; note = 2'-O-methyl modified nucleotide
  modified_base 34: mod_base = OTHER; note = 2'-O-methyl modified nucleotide
  modified_base 35: mod_base = OTHER; note = 2'-O-methyl modified nucleotide
  modified_base 36: mod_base = OTHER; note = 2'-O-methyl modified nucleotide
  modified_base 37: mod_base = OTHER; note = 2'-O-methyl modified nucleotide
  modified_base 38: mod_base = OTHER; note = 2'-O-methyl modified nucleotide
  modified_base 39: mod_base = OTHER; note = 2'-O-methyl modified nucleotide
  modified_base 40: mod_base = OTHER; note = 2'-O-methyl modified nucleotide
  modified_base 69: mod_base = OTHER; note = 2'-O-methyl modified nucleotide
  modified_base 70: mod_base = OTHER; note = 2'-O-methyl modified nucleotide
  modified_base 71: mod_base = OTHER; note = 2'-O-methyl modified nucleotide
  modified_base 72: mod_base = OTHER; note = 2'-O-methyl modified nucleotide
  modified_base 73: mod_base = OTHER; note = 2'-O-methyl modified nucleotide
  modified_base 74: mod_base = OTHER; note = 2'-O-methyl modified nucleotide
  modified_base 75: mod_base = OTHER; note = 2'-O-methyl modified nucleotide
  modified_base 76: mod_base = OTHER; note = 2'-O-methyl modified nucleotide
  modified_base 77: mod_base = OTHER; note = 2'-O-methyl modified nucleotide
  modified_base 78: mod_base = OTHER; note = 2'-O-methyl modified nucleotide
  modified_base 79: mod_base = OTHER; note = 2'-O-methyl modified nucleotide
  modified_base 80: mod_base = OTHER; note = 2'-O-methyl modified nucleotide
  modified_base 81: mod_base = OTHER; note = 2'-O-methyl modified nucleotide
  modified_base 82: mod_base = OTHER; note = 2'-O-methyl modified nucleotide
  modified_base 83: mod_base = OTHER; note = 2'-O-methyl modified nucleotide
  modified_base 84: mod_base = OTHER; note = 2'-O-methyl modified nucleotide
  modified_base 85: mod_base = OTHER; note = 2'-O-methyl modified nucleotide
  modified_base 86: mod_base = OTHER; note = 2'-O-methyl modified nucleotide
  modified_base 87: mod_base = OTHER; note = 2'-O-methyl modified nucleotide
  modified_base 88: mod_base = OTHER; note = 2'-O-methyl modified nucleotide
  modified_base 89: mod_base = OTHER; note = 2'-O-methyl modified nucleotide
  modified_base 90: mod_base = OTHER; note = 2'-O-methyl modified nucleotide
  modified_base 91: mod_base = OTHER; note = 2'-O-methyl modified nucleotide
  modified_base 92: mod_base = OTHER; note = 2'-O-methyl modified nucleotide
  modified_base 93: mod_base = OTHER; note = 2'-O-methyl modified nucleotide
  modified_base 94: mod_base = OTHER; note = 2'-O-methyl modified nucleotide
  modified_base 95: mod_base = OTHER; note = 2'-O-methyl modified nucleotide
  modified_base 96: mod_base = OTHER; note = 2'-O-methyl modified nucleotide
  modified_base 128: mod_base = OTHER; note = Nucleotide with phosphorothioate linkage
  modified_base 129: mod_base = OTHER; note = 2'-O-methyl modified nucleotide with phosphorothioate linkage
  modified_base 130: mod_base = OTHER; note = 2'-O-methyl modified nucleotide with phosphorothioate linkage
  modified_base 131: mod_base = OTHER; note = 2'-O-methyl modified nucleotide
gagtagcgcgagcacagctagttttagagctagaaatagcaagttaaaataaggctagtccgttatcaacttgaaaaagtggcaccgagtcggtgctctcgctccgtggccttagtaacctgtgctcgcgc

SEQ ID NO: 17771 - RNA, 130 nt, synthetic construct
  source 1..130: mol_type = other RNA
  modified_base 1: mod_base = OTHER; note = 2'-O-methyl modified nucleotide with phosphorothioate linkage
  modified_base 2: mod_base = OTHER; note = 2'-O-methyl modified nucleotide with phosphorothioate linkage
  modified_base 3: mod_base = OTHER; note = 2'-O-methyl modified nucleotide with phosphorothioate linkage
  modified_base 29: mod_base = OTHER; note = 2'-O-methyl modified nucleotide
  modified_base 30: mod_base = OTHER; note = 2'-O-methyl modified nucleotide
  modified_base 31: mod_base = OTHER; note = 2'-O-methyl modified nucleotide
  modified_base 32: mod_base = OTHER; note = 2'-O-methyl modified nucleotide
  modified_base 33: mod_base = OTHER; note = 2'-O-methyl modified nucleotide
  modified_base 34: mod_base = OTHER; note = 2'-O-methyl modified nucleotide
  modified_base 35: mod_base = OTHER; note = 2'-O-methyl modified nucleotide
  modified_base 36: mod_base = OTHER; note = 2'-O-methyl modified nucleotide
  modified_base 37: mod_base = OTHER; note = 2'-O-methyl modified nucleotide
  modified_base 38: mod_base = OTHER; note = 2'-O-methyl modified nucleotide
  modified_base 39: mod_base = OTHER; note = 2'-O-methyl modified nucleotide
  modified_base 40: mod_base = OTHER; note = 2'-O-methyl modified nucleotide
  modified_base 69: mod_base = OTHER; note = 2'-O-methyl modified nucleotide
  modified_base 70: mod_base = OTHER; note = 2'-O-methyl modified nucleotide
  modified_base 71: mod_base = OTHER; note = 2'-O-methyl modified nucleotide
  modified_base 72: mod_base = OTHER; note = 2'-O-methyl modified nucleotide
  modified_base 73: mod_base = OTHER; note = 2'-O-methyl modified nucleotide
  modified_base 74: mod_base = OTHER; note = 2'-O-methyl modified nucleotide
  modified_base 75: mod_base = OTHER; note = 2'-O-methyl modified nucleotide
  modified_base 76: mod_base = OTHER; note = 2'-O-methyl modified nucleotide
  modified_base 77: mod_base = OTHER; note = 2'-O-methyl modified nucleotide
  modified_base 78: mod_base = OTHER; note = 2'-O-methyl modified nucleotide
  modified_base 79: mod_base = OTHER; note = 2'-O-methyl modified nucleotide
  modified_base 80: mod_base = OTHER; note = 2'-O-methyl modified nucleotide
  modified_base 81: mod_base = OTHER; note = 2'-O-methyl modified nucleotide
  modified_base 82: mod_base = OTHER; note = 2'-O-methyl modified nucleotide
  modified_base 83: mod_base = OTHER; note = 2'-O-methyl modified nucleotide
  modified_base 84: mod_base = OTHER; note = 2'-O-methyl modified nucleotide
  modified_base 85: mod_base = OTHER; note = 2'-O-methyl modified nucleotide
  modified_base 86: mod_base = OTHER; note = 2'-O-methyl modified nucleotide
  modified_base 87: mod_base = OTHER; note = 2'-O-methyl modified nucleotide
  modified_base 88: mod_base = OTHER; note = 2'-O-methyl modified nucleotide
  modified_base 89: mod_base = OTHER; note = 2'-O-methyl modified nucleotide
  modified_base 90: mod_base = OTHER; note = 2'-O-methyl modified nucleotide
  modified_base 91: mod_base = OTHER; note = 2'-O-methyl modified nucleotide
  modified_base 92: mod_base = OTHER; note = 2'-O-methyl modified nucleotide
  modified_base 93: mod_base = OTHER; note = 2'-O-methyl modified nucleotide
  modified_base 94: mod_base = OTHER; note = 2'-O-methyl modified nucleotide
  modified_base 95: mod_base = OTHER; note = 2'-O-methyl modified nucleotide
  modified_base 96: mod_base = OTHER; note = 2'-O-methyl modified nucleotide
  modified_base 127: mod_base = OTHER; note = Nucleotide with phosphorothioate linkage
  modified_base 128: mod_base = OTHER; note = 2'-O-methyl modified nucleotide with phosphorothioate linkage
  modified_base 129: mod_base = OTHER; note = 2'-O-methyl modified nucleotide with phosphorothioate linkage
  modified_base 130: mod_base = OTHER; note = 2'-O-methyl modified nucleotide
gagtagcgcgagcacagctagttttagagctagaaatagcaagttaaaataaggctagtccgttatcaacttgaaaaagtggcaccgagtcggtgctctcgctccgtggccttagtaacctgtgctcgcg

SEQ ID NO: 17772 - RNA, 129 nt, synthetic construct
  source 1..129: mol_type = other RNA
  modified_base 1: mod_base = OTHER; note = 2'-O-methyl modified nucleotide with phosphorothioate linkage
  modified_base 2: mod_base = OTHER; note = 2'-O-methyl modified nucleotide with phosphorothioate linkage
  modified_base 3: mod_base = OTHER; note = 2'-O-methyl modified nucleotide with phosphorothioate linkage
  modified_base 29: mod_base = OTHER; note = 2'-O-methyl modified nucleotide
  modified_base 30: mod_base = OTHER; note = 2'-O-methyl modified nucleotide
  modified_base 31: mod_base = OTHER; note = 2'-O-methyl modified nucleotide
  modified_base 32: mod_base = OTHER; note = 2'-O-methyl modified nucleotide
  modified_base 33: mod_base = OTHER; note = 2'-O-methyl modified nucleotide
  modified_base 34: mod_base = OTHER; note = 2'-O-methyl modified nucleotide
  modified_base 35: mod_base = OTHER; note = 2'-O-methyl modified nucleotide
  modified_base 36: mod_base = OTHER; note = 2'-O-methyl modified nucleotide
  modified_base 37: mod_base = OTHER; note = 2'-O-methyl modified nucleotide
  modified_base 38: mod_base = OTHER; note = 2'-O-methyl modified nucleotide
  modified_base 39: mod_base = OTHER; note = 2'-O-methyl modified nucleotide
  modified_base 40: mod_base = OTHER; note = 2'-O-methyl modified nucleotide
  modified_base 69: mod_base = OTHER; note = 2'-O-methyl modified nucleotide
  modified_base 70: mod_base = OTHER; note = 2'-O-methyl modified nucleotide
  modified_base 71: mod_base = OTHER; note = 2'-O-methyl modified nucleotide
  modified_base 72: mod_base = OTHER; note = 2'-O-methyl modified nucleotide
  modified_base 73: mod_base = OTHER; note = 2'-O-methyl modified nucleotide
  modified_base 74: mod_base = OTHER; note = 2'-O-methyl modified nucleotide
  modified_base 75: mod_base = OTHER; note = 2'-O-methyl modified nucleotide
  modified_base 76: mod_base = OTHER; note = 2'-O-methyl modified nucleotide
  modified_base 77: mod_base = OTHER; note = 2'-O-methyl modified nucleotide
  modified_base 78: mod_base = OTHER; note = 2'-O-methyl modified nucleotide
  modified_base 79: mod_base = OTHER; note = 2'-O-methyl modified nucleotide
  modified_base 80: mod_base = OTHER; note = 2'-O-methyl modified nucleotide
  modified_base 81: mod_base = OTHER; note = 2'-O-methyl modified nucleotide
  modified_base 82: mod_base = OTHER; note = 2'-O-methyl modified nucleotide
  modified_base 83: mod_base = OTHER; note = 2'-O-methyl modified nucleotide
  modified_base 84: mod_base = OTHER; note = 2'-O-methyl modified nucleotide
  modified_base 85: mod_base = OTHER; note = 2'-O-methyl modified nucleotide
  modified_base 86: mod_base = OTHER; note = 2'-O-methyl modified nucleotide
  modified_base 87: mod_base = OTHER; note = 2'-O-methyl modified nucleotide
  modified_base 88: mod_base = OTHER; note = 2'-O-methyl modified nucleotide
  modified_base 89: mod_base = OTHER; note = 2'-O-methyl modified nucleotide
  modified_base 90: mod_base = OTHER; note = 2'-O-methyl modified nucleotide
  modified_base 91: mod_base = OTHER; note = 2'-O-methyl modified nucleotide
  modified_base 92: mod_base = OTHER; note = 2'-O-methyl modified nucleotide
  modified_base 93: mod_base = OTHER; note = 2'-O-methyl modified nucleotide
  modified_base 94: mod_base = OTHER; note = 2'-O-methyl modified nucleotide
  modified_base 95: mod_base = OTHER; note = 2'-O-methyl modified nucleotide
  modified_base 96: mod_base = OTHER; note = 2'-O-methyl modified nucleotide
  modified_base 126: mod_base = OTHER; note = Nucleotide with phosphorothioate linkage
  modified_base 127: mod_base = OTHER; note = 2'-O-methyl modified nucleotide with phosphorothioate linkage
  modified_base 128: mod_base = OTHER; note = 2'-O-methyl modified nucleotide with phosphorothioate linkage
  modified_base 129: mod_base = OTHER; note = 2'-O-methyl modified nucleotide
gagtagcgcgagcacagctagttttagagctagaaatagcaagttaaaataaggctagtccgttatcaacttgaaaaagtggcaccgagtcggtgctctcgctccgtggccttagtaacctgtgctcgc

SEQ ID NO: 17773 - RNA, 128 nt, synthetic construct
  source 1..128: mol_type = other RNA
  modified_base 1: mod_base = OTHER; note = 2'-O-methyl modified nucleotide with phosphorothioate linkage
  modified_base 2: mod_base = OTHER; note = 2'-O-methyl modified nucleotide with phosphorothioate linkage
  modified_base 3: mod_base = OTHER; note = 2'-O-methyl modified nucleotide with phosphorothioate linkage
  modified_base 29: mod_base = OTHER; note = 2'-O-methyl modified nucleotide
  modified_base 30: mod_base = OTHER; note = 2'-O-methyl modified nucleotide
  modified_base 31: mod_base = OTHER; note = 2'-O-methyl modified nucleotide
  modified_base 32: mod_base = OTHER; note = 2'-O-methyl modified nucleotide
  modified_base 33: mod_base = OTHER; note = 2'-O-methyl modified nucleotide
  modified_base 34: mod_base = OTHER; note = 2'-O-methyl modified nucleotide
  modified_base 35: mod_base = OTHER; note = 2'-O-methyl modified nucleotide
  modified_base 36: mod_base = OTHER; note = 2'-O-methyl modified nucleotide
  modified_base 37: mod_base = OTHER; note = 2'-O-methyl modified nucleotide
  modified_base 38: mod_base = OTHER; note = 2'-O-methyl modified nucleotide
  modified_base 39: mod_base = OTHER; note = 2'-O-methyl modified nucleotide
  modified_base 40: mod_base = OTHER; note = 2'-O-methyl modified nucleotide
  modified_base 69: mod_base = OTHER; note = 2'-O-methyl modified nucleotide
  modified_base 70: mod_base = OTHER; note = 2'-O-methyl modified nucleotide
  modified_base 71: mod_base = OTHER; note = 2'-O-methyl modified nucleotide
  modified_base 72: mod_base = OTHER; note = 2'-O-methyl modified nucleotide
  modified_base 73: mod_base = OTHER; note = 2'-O-methyl modified nucleotide
  modified_base 74: mod_base = OTHER; note = 2'-O-methyl modified nucleotide
  modified_base 75: mod_base = OTHER; note = 2'-O-methyl modified nucleotide
  modified_base 76: mod_base = OTHER; note = 2'-O-methyl modified nucleotide
  modified_base 77: mod_base = OTHER; note = 2'-O-methyl modified nucleotide
  modified_base 78: mod_base = OTHER; note = 2'-O-methyl modified nucleotide
  modified_base 79: mod_base = OTHER; note = 2'-O-methyl modified nucleotide
  modified_base 80: mod_base = OTHER; note = 2'-O-methyl modified nucleotide
  modified_base 81: mod_base = OTHER; note = 2'-O-methyl modified nucleotide
  modified_base 82: mod_base = OTHER; note = 2'-O-methyl modified nucleotide
  modified_base 83: mod_base = OTHER; note = 2'-O-methyl modified nucleotide
  modified_base 84: mod_base = OTHER; note = 2'-O-methyl modified nucleotide
  modified_base 85: mod_base = OTHER; note = 2'-O-methyl modified nucleotide
  modified_base 86: mod_base = OTHER; note = 2'-O-methyl modified nucleotide
  modified_base 87: mod_base = OTHER; note = 2'-O-methyl modified nucleotide
  modified_base 88: mod_base = OTHER; note = 2'-O-methyl modified nucleotide
  modified_base 89: mod_base = OTHER; note = 2'-O-methyl modified nucleotide
  modified_base 90: mod_base = OTHER; note = 2'-O-methyl modified nucleotide
  modified_base 91: mod_base = OTHER; note = 2'-O-methyl modified nucleotide
  modified_base 92: mod_base = OTHER; note = 2'-O-methyl modified nucleotide
  modified_base 93: mod_base = OTHER; note = 2'-O-methyl modified nucleotide
  modified_base 94: mod_base = OTHER; note = 2'-O-methyl modified nucleotide
  modified_base 95: mod_base = OTHER; note = 2'-O-methyl modified nucleotide
  modified_base 96: mod_base = OTHER; note = 2'-O-methyl modified nucleotide
  modified_base 125: mod_base = OTHER; note = Nucleotide with phosphorothioate linkage
  modified_base 126: mod_base = OTHER; note = 2'-O-methyl modified nucleotide with phosphorothioate linkage
  modified_base 127: mod_base = OTHER; note = 2'-O-methyl modified nucleotide with phosphorothioate linkage
  modified_base 128: mod_base = OTHER; note = 2'-O-methyl modified nucleotide
gagtagcgcgagcacagctagttttagagctagaaatagcaagttaaaataaggctagtccgttatcaacttgaaaaagtggcaccgagtcggtgctctcgctccgtggccttagtaacctgtgctcg

SEQ ID NO: 17774 - RNA, 127 nt, synthetic construct
  source 1..127: mol_type = other RNA
  modified_base 1: mod_base = OTHER; note = 2'-O-methyl modified nucleotide with phosphorothioate linkage
  modified_base 2: mod_base = OTHER; note = 2'-O-methyl modified nucleotide with phosphorothioate linkage
  modified_base 3: mod_base = OTHER; note = 2'-O-methyl modified nucleotide with phosphorothioate linkage
  modified_base 29: mod_base = OTHER; note = 2'-O-methyl modified nucleotide
  modified_base 30: mod_base = OTHER; note = 2'-O-methyl modified nucleotide
  modified_base 31: mod_base = OTHER; note = 2'-O-methyl modified nucleotide
  modified_base 32: mod_base = OTHER; note = 2'-O-methyl modified nucleotide
  modified_base 33: mod_base = OTHER; note = 2'-O-methyl modified nucleotide
  modified_base 34: mod_base = OTHER; note = 2'-O-methyl modified nucleotide
  modified_base 35: mod_base = OTHER; note = 2'-O-methyl modified nucleotide
  modified_base 36: mod_base = OTHER; note = 2'-O-methyl modified nucleotide
  modified_base 37: mod_base = OTHER; note = 2'-O-methyl modified nucleotide
  modified_base 38: mod_base = OTHER; note = 2'-O-methyl modified nucleotide
  modified_base 39: mod_base = OTHER; note = 2'-O-methyl modified nucleotide
  modified_base 40: mod_base = OTHER; note = 2'-O-methyl modified nucleotide
  modified_base 69: mod_base = OTHER; note = 2'-O-methyl modified nucleotide
  modified_base 70: mod_base = OTHER; note = 2'-O-methyl modified nucleotide
  modified_base 71: mod_base = OTHER; note = 2'-O-methyl modified nucleotide
  modified_base 72: mod_base = OTHER; note = 2'-O-methyl modified nucleotide
  modified_base 73: mod_base = OTHER; note = 2'-O-methyl modified nucleotide
  modified_base 74: mod_base = OTHER; note = 2'-O-methyl modified nucleotide
  modified_base 75: mod_base = OTHER; note = 2'-O-methyl modified nucleotide
  modified_base 76: mod_base = OTHER; note = 2'-O-methyl modified nucleotide
  modified_base 77: mod_base = OTHER; note = 2'-O-methyl modified nucleotide
  modified_base 78: mod_base = OTHER; note = 2'-O-methyl modified nucleotide
  modified_base 79: mod_base = OTHER; note = 2'-O-methyl modified nucleotide
  modified_base 80: mod_base = OTHER; note = 2'-O-methyl modified nucleotide
  modified_base 81: mod_base = OTHER; note = 2'-O-methyl modified nucleotide
  modified_base 82: mod_base = OTHER; note = 2'-O-methyl modified nucleotide
  modified_base 83: mod_base = OTHER; note = 2'-O-methyl modified nucleotide
  modified_base 84: mod_base = OTHER; note = 2'-O-methyl modified nucleotide
  modified_base 85: mod_base = OTHER; note = 2'-O-methyl modified nucleotide
  modified_base 86: mod_base = OTHER; note = 2'-O-methyl modified nucleotide
  modified_base 87: mod_base = OTHER; note = 2'-O-methyl modified nucleotide
  modified_base 88: mod_base = OTHER; note = 2'-O-methyl modified nucleotide
  modified_base 89: mod_base = OTHER; note = 2'-O-methyl modified nucleotide
  modified_base 90: mod_base = OTHER; note = 2'-O-methyl modified nucleotide
  modified_base 91: mod_base = OTHER; note = 2'-O-methyl modified nucleotide
  modified_base 92: mod_base = OTHER; note = 2'-O-methyl modified nucleotide
  modified_base 93: mod_base = OTHER; note = 2'-O-methyl modified nucleotide
  modified_base 94: mod_base = OTHER; note = 2'-O-methyl modified nucleotide
  modified_base 95: mod_base = OTHER; note = 2'-O-methyl modified nucleotide
  modified_base 96: mod_base = OTHER; note = 2'-O-methyl modified nucleotide
  modified_base 124: mod_base = OTHER; note = Nucleotide with phosphorothioate linkage
  modified_base 125: mod_base = OTHER; note = 2'-O-methyl modified nucleotide with phosphorothioate linkage
  modified_base 126: mod_base = OTHER; note = 2'-O-methyl modified nucleotide with phosphorothioate linkage
  modified_base 127: mod_base = OTHER; note = 2'-O-methyl modified nucleotide
gagtagcgcgagcacagctagttttagagctagaaatagcaagttaaaataaggctagtccgttatcaacttgaaaaagtggcaccgagtcggtgctctcgctccgtggccttagtaacctgtgctc

SEQ ID NO: 17775 - RNA, 121 nt, synthetic construct
  source 1..121: mol_type = other RNA
  modified_base 1: mod_base = OTHER; note = 2'-O-methyl modified nucleotide with phosphorothioate linkage
  modified_base 2: mod_base = OTHER; note = 2'-O-methyl modified nucleotide with phosphorothioate linkage
  modified_base 3: mod_base = OTHER; note = 2'-O-methyl modified nucleotide with phosphorothioate linkage
  modified_base 29: mod_base = OTHER; note = 2'-O-methyl modified nucleotide
  modified_base 30: mod_base = OTHER; note = 2'-O-methyl modified nucleotide
  modified_base 31: mod_base = OTHER; note = 2'-O-methyl modified nucleotide
  modified_base 32: mod_base = OTHER; note = 2'-O-methyl modified nucleotide
  modified_base 33: mod_base = OTHER; note = 2'-O-methyl modified nucleotide
  modified_base 34: mod_base = OTHER; note = 2'-O-methyl modified nucleotide
  modified_base 35: mod_base = OTHER; note = 2'-O-methyl modified nucleotide
  modified_base 36: mod_base = OTHER; note = 2'-O-methyl modified nucleotide
  modified_base 37: mod_base = OTHER; note = 2'-O-methyl modified nucleotide
  modified_base 38: mod_base = OTHER; note = 2'-O-methyl modified nucleotide
  modified_base 39: mod_base = OTHER; note = 2'-O-methyl modified nucleotide
  modified_base 40: mod_base = OTHER; note = 2'-O-methyl modified nucleotide
  modified_base 69: mod_base = OTHER; note = 2'-O-methyl modified nucleotide
  modified_base 70: mod_base = OTHER; note = 2'-O-methyl modified nucleotide
  modified_base 71: mod_base = OTHER; note = 2'-O-methyl modified nucleotide
  modified_base 72: mod_base = OTHER; note = 2'-O-methyl modified nucleotide
  modified_base 73: mod_base = OTHER; note = 2'-O-methyl modified nucleotide
  modified_base 74: mod_base = OTHER; note = 2'-O-methyl modified nucleotide
  modified_base 75: mod_base = OTHER; note = 2'-O-methyl modified nucleotide
  modified_base 76: mod_base = OTHER; note = 2'-O-methyl modified nucleotide
  modified_base 77: mod_base = OTHER; note = 2'-O-methyl modified nucleotide
  modified_base 78: mod_base = OTHER; note = 2'-O-methyl modified nucleotide
  modified_base 79: mod_base = OTHER; note = 2'-O-methyl modified nucleotide
  modified_base 80: mod_base = OTHER; note = 2'-O-methyl modified nucleotide
  modified_base 81: mod_base = OTHER; note = 2'-O-methyl modified nucleotide
  modified_base 82: mod_base = OTHER; note = 2'-O-methyl modified nucleotide
  modified_base 83: mod_base = OTHER; note = 2'-O-methyl modified nucleotide
  modified_base 84: mod_base = OTHER; note = 2'-O-methyl modified nucleotide
  modified_base 85: mod_base = OTHER; note = 2'-O-methyl modified nucleotide
  modified_base 86: mod_base = OTHER; note = 2'-O-methyl modified nucleotide
  modified_base 87: mod_base = OTHER; note = 2'-O-methyl modified nucleotide
  modified_base 88: mod_base = OTHER; note = 2'-O-methyl modified nucleotide
  modified_base 89: mod_base = OTHER; note = 2'-O-methyl modified nucleotide
  modified_base 90: mod_base = OTHER; note = 2'-O-methyl modified nucleotide
  modified_base 91: mod_base = OTHER; note = 2'-O-methyl modified nucleotide
  modified_base 92: mod_base = OTHER; note = 2'-O-methyl modified nucleotide
  modified_base 93: mod_base = OTHER; note = 2'-O-methyl modified nucleotide
  modified_base 94: mod_base = OTHER; note = 2'-O-methyl modified nucleotide
  modified_base 95: mod_base = OTHER; note = 2'-O-methyl modified nucleotide
  modified_base 96: mod_base = OTHER; note = 2'-O-methyl modified nucleotide
  modified_base 118: mod_base = OTHER; note = Nucleotide with phosphorothioate linkage
  modified_base 119: mod_base = OTHER; note = 2'-O-methyl modified nucleotide with phosphorothioate linkage
  modified_base 120: mod_base = OTHER; note = 2'-O-methyl modified nucleotide with phosphorothioate linkage
  modified_base 121: mod_base = OTHER; note = 2'-O-methyl modified nucleotide
gagtagcgcgagcacagctagttttagagctagaaatagcaagttaaaataaggctagtccgttatcaacttgaaaaagtggcaccgagtcggtgcgccttagtgatgctgtgctcgcgct

SEQ ID NO: 17776 - RNA, 120 nt, synthetic construct
  source 1..120: mol_type = other RNA
  modified_base 1: mod_base = OTHER; note = 2'-O-methyl modified nucleotide with phosphorothioate linkage
  modified_base 2: mod_base = OTHER; note = 2'-O-methyl modified nucleotide with phosphorothioate linkage
  modified_base 3: mod_base = OTHER; note = 2'-O-methyl modified nucleotide with phosphorothioate linkage
  modified_base 29: mod_base = OTHER; note = 2'-O-methyl modified nucleotide
  modified_base 30: mod_base = OTHER; note = 2'-O-methyl modified nucleotide
  modified_base 31: mod_base = OTHER; note = 2'-O-methyl modified nucleotide
  modified_base 32: mod_base = OTHER; note = 2'-O-methyl modified nucleotide
  modified_base 33: mod_base = OTHER; note = 2'-O-methyl modified nucleotide
  modified_base 34: mod_base = OTHER; note = 2'-O-methyl modified nucleotide
  modified_base 35: mod_base = OTHER; note = 2'-O-methyl modified nucleotide
  modified_base 36: mod_base = OTHER; note = 2'-O-methyl modified nucleotide
  modified_base 37: mod_base = OTHER; note = 2'-O-methyl modified nucleotide
  modified_base 38: mod_base = OTHER; note = 2'-O-methyl modified nucleotide
  modified_base 39: mod_base = OTHER; note = 2'-O-methyl modified nucleotide
  modified_base 40: mod_base = OTHER; note = 2'-O-methyl modified nucleotide
  modified_base 69: mod_base = OTHER; note = 2'-O-methyl modified nucleotide
  modified_base 70: mod_base = OTHER; note = 2'-O-methyl modified nucleotide
  modified_base 71: mod_base = OTHER; note = 2'-O-methyl modified nucleotide
  modified_base 72: mod_base = OTHER; note = 2'-O-methyl modified nucleotide
  modified_base 73: mod_base = OTHER; note = 2'-O-methyl modified nucleotide
  modified_base 74: mod_base = OTHER; note = 2'-O-methyl modified nucleotide
  modified_base 75: mod_base = OTHER; note = 2'-O-methyl modified nucleotide
  modified_base 76: mod_base = OTHER; note = 2'-O-methyl modified nucleotide
  modified_base 77: mod_base = OTHER; note = 2'-O-methyl modified nucleotide
  modified_base 78: mod_base = OTHER; note = 2'-O-methyl modified nucleotide
  modified_base 79: mod_base = OTHER; note = 2'-O-methyl modified nucleotide
  modified_base 80: mod_base = OTHER; note = 2'-O-methyl modified nucleotide
  modified_base 81: mod_base = OTHER; note = 2'-O-methyl modified nucleotide
  modified_base 82: mod_base = OTHER; note = 2'-O-methyl modified nucleotide
  modified_base 83: mod_base = OTHER; note = 2'-O-methyl modified nucleotide
  modified_base 84: mod_base = OTHER; note = 2'-O-methyl modified nucleotide
  modified_base 85: mod_base = OTHER; note = 2'-O-methyl modified nucleotide
  modified_base 86: mod_base = OTHER; note = 2'-O-methyl modified nucleotide
  modified_base 87: mod_base = OTHER; note = 2'-O-methyl modified nucleotide
  modified_base 88: mod_base = OTHER; note = 2'-O-methyl modified nucleotide
  modified_base 89: mod_base = OTHER; note = 2'-O-methyl modified nucleotide
  modified_base 90: mod_base = OTHER; note = 2'-O-methyl modified nucleotide
  modified_base 91: mod_base = OTHER; note = 2'-O-methyl modified nucleotide
  modified_base 92: mod_base = OTHER; note = 2'-O-methyl modified nucleotide
  modified_base 93: mod_base = OTHER; note = 2'-O-methyl modified nucleotide
  modified_base 94: mod_base = OTHER; note = 2'-O-methyl modified nucleotide
  modified_base 95: mod_base = OTHER; note = 2'-O-methyl modified nucleotide
  modified_base 96: mod_base = OTHER; note = 2'-O-methyl modified nucleotide
  modified_base 117: mod_base = OTHER; note = Nucleotide with phosphorothioate linkage
  modified_base 118: mod_base = OTHER; note = 2'-O-methyl modified nucleotide with phosphorothioate linkage
  modified_base 119: mod_base = OTHER; note = 2'-O-methyl modified nucleotide with phosphorothioate linkage
  modified_base 120: mod_base = OTHER; note = 2'-O-methyl modified nucleotide
gagtagcgcgagcacagctagttttagagctagaaatagcaagttaaaataaggctagtccgttatcaacttgaaaaagtggcaccgagtcggtgcgccttagtgatgctgtgctcgcgc

SEQ ID NO: 17777 - RNA, 119 nt, synthetic construct
  source 1..119: mol_type = other RNA
  modified_base 1: mod_base = OTHER; note = 2'-O-methyl modified nucleotide with phosphorothioate linkage
  modified_base 2: mod_base = OTHER; note = 2'-O-methyl modified nucleotide with phosphorothioate linkage
  modified_base 3: mod_base = OTHER; note = 2'-O-methyl modified nucleotide with phosphorothioate linkage
  modified_base 29: mod_base = OTHER; note = 2'-O-methyl modified nucleotide
  modified_base 30: mod_base = OTHER; note = 2'-O-methyl modified nucleotide
  modified_base 31: mod_base = OTHER; note = 2'-O-methyl modified nucleotide
  modified_base 32: mod_base = OTHER; note = 2'-O-methyl modified nucleotide
  modified_base 33: mod_base = OTHER; note = 2'-O-methyl modified nucleotide
  modified_base 34: mod_base = OTHER; note = 2'-O-methyl modified nucleotide
  modified_base 35: mod_base = OTHER; note = 2'-O-methyl modified nucleotide
  modified_base 36: mod_base = OTHER; note = 2'-O-methyl modified nucleotide
  modified_base 37: mod_base = OTHER; note = 2'-O-methyl modified nucleotide
  modified_base 38: mod_base = OTHER; note = 2'-O-methyl modified nucleotide
  modified_base 39: mod_base = OTHER; note = 2'-O-methyl modified nucleotide
  modified_base 40: mod_base = OTHER; note = 2'-O-methyl modified nucleotide
  modified_base 69: mod_base = OTHER; note = 2'-O-methyl modified nucleotide
  modified_base 70: mod_base = OTHER; note = 2'-O-methyl modified nucleotide
  modified_base 71: mod_base = OTHER; note = 2'-O-methyl modified nucleotide
  modified_base 72: mod_base = OTHER; note = 2'-O-methyl modified nucleotide
  modified_base 73: mod_base = OTHER; note = 2'-O-methyl modified nucleotide
  modified_base 74: mod_base = OTHER; note = 2'-O-methyl modified nucleotide
  modified_base 75: mod_base = OTHER; note = 2'-O-methyl modified nucleotide
  modified_base 76: mod_base = OTHER; note = 2'-O-methyl modified nucleotide
  modified_base 77: mod_base = OTHER; note = 2'-O-methyl modified nucleotide
  modified_base 78: mod_base = OTHER; note = 2'-O-methyl modified nucleotide
  modified_base 79: mod_base = OTHER; note = 2'-O-methyl modified nucleotide
  modified_base 80: mod_base = OTHER; note = 2'-O-methyl modified nucleotide
  modified_base 81: mod_base = OTHER; note = 2'-O-methyl modified nucleotide
  modified_base 82: mod_base = OTHER; note = 2'-O-methyl modified nucleotide
  modified_base 83: mod_base = OTHER; note = 2'-O-methyl modified nucleotide
  modified_base 84: mod_base = OTHER; note = 2'-O-methyl modified nucleotide
  modified_base 85: mod_base = OTHER; note = 2'-O-methyl modified nucleotide
  modified_base 86: mod_base = OTHER; note = 2'-O-methyl modified nucleotide
  modified_base 87: mod_base = OTHER; note = 2'-O-methyl modified nucleotide
  modified_base 88: mod_base = OTHER; note = 2'-O-methyl modified nucleotide
  modified_base 89: mod_base = OTHER; note = 2'-O-methyl modified nucleotide
  modified_base 90: mod_base = OTHER; note = 2'-O-methyl modified nucleotide
  modified_base 91: mod_base = OTHER; note = 2'-O-methyl modified nucleotide
  modified_base 92: mod_base = OTHER; note = 2'-O-methyl modified nucleotide
  modified_base 93: mod_base = OTHER; note = 2'-O-methyl modified nucleotide
  modified_base 94: mod_base = OTHER; note = 2'-O-methyl modified nucleotide
  modified_base 95: mod_base = OTHER; note = 2'-O-methyl modified nucleotide
  modified_base 96: mod_base = OTHER; note = 2'-O-methyl modified nucleotide
  modified_base 116: mod_base = OTHER; note = Nucleotide with phosphorothioate linkage
  modified_base 117: mod_base = OTHER; note = 2'-O-methyl modified nucleotide with phosphorothioate linkage
  modified_base 118: mod_base = OTHER; note = 2'-O-methyl modified nucleotide with phosphorothioate linkage
  modified_base 119: mod_base = OTHER; note = 2'-O-methyl modified nucleotide
gagtagcgcgagcacagctagttttagagctagaaatagcaagttaaaataaggctagtccgttatcaacttgaaaaagtggcaccgagtcggtgcgccttagtgatgctgtgctcgcg

SEQ ID NO: 17778 - RNA, 118 nt, synthetic construct
  source 1..118: mol_type = other RNA
  modified_base 1: mod_base = OTHER; note = 2'-O-methyl modified nucleotide with phosphorothioate linkage
  modified_base 2: mod_base = OTHER; note = 2'-O-methyl modified nucleotide with phosphorothioate linkage
  modified_base 3: mod_base = OTHER; note = 2'-O-methyl modified nucleotide with phosphorothioate linkage
  modified_base 29: mod_base = OTHER; note = 2'-O-methyl modified nucleotide
  modified_base 30: mod_base = OTHER; note = 2'-O-methyl modified nucleotide
  modified_base 31: mod_base = OTHER; note = 2'-O-methyl modified nucleotide
  modified_base 32: mod_base = OTHER; note = 2'-O-methyl modified nucleotide
  modified_base 33: mod_base = OTHER; note = 2'-O-methyl modified nucleotide
  modified_base 34: mod_base = OTHER; note = 2'-O-methyl modified nucleotide
  modified_base 35: mod_base = OTHER; note = 2'-O-methyl modified nucleotide
  modified_base 36: mod_base = OTHER; note = 2'-O-methyl modified nucleotide
  modified_base 37: mod_base = OTHER; note = 2'-O-methyl modified nucleotide
  modified_base 38: mod_base = OTHER; note = 2'-O-methyl modified nucleotide
  modified_base 39: mod_base = OTHER; note = 2'-O-methyl modified nucleotide
  modified_base 40: mod_base = OTHER; note = 2'-O-methyl modified nucleotide
  modified_base 69: mod_base = OTHER; note = 2'-O-methyl modified nucleotide
  modified_base 70: mod_base = OTHER; note = 2'-O-methyl modified nucleotide
  modified_base 71: mod_base = OTHER; note = 2'-O-methyl modified nucleotide
  modified_base 72: mod_base = OTHER; note = 2'-O-methyl modified nucleotide
  modified_base 73: mod_base = OTHER; note = 2'-O-methyl modified nucleotide
  modified_base 74: mod_base = OTHER; note = 2'-O-methyl modified nucleotide
  modified_base 75: mod_base = OTHER; note = 2'-O-methyl modified nucleotide
  modified_base 76: mod_base = OTHER; note = 2'-O-methyl modified nucleotide
  modified_base 77: mod_base = OTHER; note = 2'-O-methyl modified nucleotide
  modified_base 78: mod_base = OTHER; note = 2'-O-methyl modified nucleotide
  modified_base 79: mod_base = OTHER; note = 2'-O-methyl modified nucleotide
  modified_base 80: mod_base = OTHER; note = 2'-O-methyl modified nucleotide
  modified_base 81: mod_base = OTHER; note = 2'-O-methyl modified nucleotide
  modified_base 82: mod_base = OTHER; note = 2'-O-methyl modified nucleotide
  modified_base 83: mod_base = OTHER; note = 2'-O-methyl modified nucleotide
  modified_base 84: mod_base = OTHER; note = 2'-O-methyl modified nucleotide
  modified_base 85: mod_base = OTHER; note = 2'-O-methyl modified nucleotide
  modified_base 86: mod_base = OTHER; note = 2'-O-methyl modified nucleotide
  modified_base 87: mod_base = OTHER; note = 2'-O-methyl modified nucleotide
  modified_base 88: mod_base = OTHER; note = 2'-O-methyl modified nucleotide
  modified_base 89: mod_base = OTHER; note = 2'-O-methyl modified nucleotide
  modified_base 90: mod_base = OTHER; note = 2'-O-methyl modified nucleotide
  modified_base 91: mod_base = OTHER; note = 2'-O-methyl modified nucleotide
  modified_base 92: mod_base = OTHER; note = 2'-O-methyl modified nucleotide
  modified_base 93: mod_base = OTHER; note = 2'-O-methyl modified nucleotide
  modified_base 94: mod_base = OTHER; note = 2'-O-methyl modified nucleotide
  modified_base 95: mod_base = OTHER; note = 2'-O-methyl modified nucleotide
  modified_base 96: mod_base = OTHER; note = 2'-O-methyl modified nucleotide
  modified_base 115: mod_base = OTHER; note = Nucleotide with phosphorothioate linkage
  modified_base 116: mod_base = OTHER; note = 2'-O-methyl modified nucleotide with phosphorothioate linkage
  modified_base 117: mod_base = OTHER; note = 2'-O-methyl modified nucleotide with phosphorothioate linkage
  modified_base 118: mod_base = OTHER; note = 2'-O-methyl modified nucleotide
gagtagcgcgagcacagctagttttagagctagaaatagcaagttaaaataaggctagtccgttatcaacttgaaaaagtggcaccgagtcggtgcgccttagtgatgctgtgctcgc

SEQ ID NO: 17779 - RNA, 117 nt, synthetic construct
  source 1..117: mol_type = other RNA
  modified_base 1: mod_base = OTHER; note = 2'-O-methyl modified nucleotide with phosphorothioate linkage
  modified_base 2: mod_base = OTHER; note = 2'-O-methyl modified nucleotide with phosphorothioate linkage
  modified_base 3: mod_base = OTHER; note = 2'-O-methyl modified nucleotide with phosphorothioate linkage
  modified_base 29: mod_base = OTHER; note = 2'-O-methyl modified nucleotide
  modified_base 30: mod_base = OTHER; note = 2'-O-methyl modified nucleotide
  modified_base 31: mod_base = OTHER; note = 2'-O-methyl modified nucleotide
  modified_base 32: mod_base = OTHER; note = 2'-O-methyl modified nucleotide
  modified_base 33: mod_base = OTHER; note = 2'-O-methyl modified nucleotide
  modified_base 34: mod_base = OTHER; note = 2'-O-methyl modified nucleotide
  modified_base 35: mod_base = OTHER; note = 2'-O-methyl modified nucleotide
  modified_base 36: mod_base = OTHER; note = 2'-O-methyl modified nucleotide
  modified_base 37: mod_base = OTHER; note = 2'-O-methyl modified nucleotide
  modified_base 38: mod_base = OTHER; note = 2'-O-methyl modified nucleotide
  modified_base 39: mod_base = OTHER; note = 2'-O-methyl modified nucleotide
  modified_base 40: mod_base = OTHER; note = 2'-O-methyl modified nucleotide
  modified_base 69: mod_base = OTHER; note = 2'-O-methyl modified nucleotide
  modified_base 70: mod_base = OTHER; note = 2'-O-methyl modified nucleotide
  modified_base 71: mod_base = OTHER; note = 2'-O-methyl modified nucleotide
  modified_base 72: mod_base = OTHER; note = 2'-O-methyl modified nucleotide
  modified_base 73: mod_base = OTHER; note = 2'-O-methyl modified nucleotide
  modified_base 74: mod_base = OTHER; note = 2'-O-methyl modified nucleotide
  modified_base 75: mod_base = OTHER; note = 2'-O-methyl modified nucleotide
  modified_base 76: mod_base = OTHER; note = 2'-O-methyl modified nucleotide
  modified_base 77: mod_base = OTHER; note = 2'-O-methyl modified nucleotide
  modified_base 78: mod_base = OTHER; note = 2'-O-methyl modified nucleotide
  modified_base 79: mod_base = OTHER; note = 2'-O-methyl modified nucleotide
  modified_base 80: mod_base = OTHER; note = 2'-O-methyl modified nucleotide
  modified_base 81: mod_base = OTHER; note = 2'-O-methyl modified nucleotide
  modified_base 82: mod_base = OTHER; note = 2'-O-methyl modified nucleotide
  modified_base 83: mod_base = OTHER; note = 2'-O-methyl modified nucleotide
  modified_base 84: mod_base = OTHER; note = 2'-O-methyl modified nucleotide
  modified_base 85: mod_base = OTHER; note = 2'-O-methyl modified nucleotide
  modified_base 86: mod_base = OTHER; note = 2'-O-methyl modified nucleotide
  modified_base 87: mod_base = OTHER; note = 2'-O-methyl modified nucleotide
  modified_base 88: mod_base = OTHER; note = 2'-O-methyl modified nucleotide
  modified_base 89: mod_base = OTHER; note = 2'-O-methyl modified nucleotide
  modified_base 90: mod_base = OTHER; note = 2'-O-methyl modified nucleotide
  modified_base 91: mod_base = OTHER; note = 2'-O-methyl modified nucleotide
  modified_base 92: mod_base = OTHER; note = 2'-O-methyl modified nucleotide
  modified_base 93: mod_base = OTHER; note = 2'-O-methyl modified nucleotide
  modified_base 94: mod_base = OTHER; note = 2'-O-methyl modified nucleotide
  modified_base 95: mod_base = OTHER; note = 2'-O-methyl modified nucleotide
  modified_base 96: mod_base = OTHER; note = 2'-O-methyl modified nucleotide
  modified_base 114: mod_base = OTHER; note = Nucleotide with phosphorothioate linkage
  modified_base 115: mod_base = OTHER; note = 2'-O-methyl modified nucleotide with phosphorothioate linkage
  modified_base 116: mod_base = OTHER; note = 2'-O-methyl modified nucleotide with phosphorothioate linkage
  modified_base 117: mod_base = OTHER; note = 2'-O-methyl modified nucleotide
gagtagcgcgagcacagctagttttagagctagaaatagcaagttaaaataaggctagtccgttatcaacttgaaaaagtggcaccgagtcggtgcgccttagtgatgctgtgctcg

SEQ ID NO: 17780 - RNA, 116 nt, synthetic construct
  source 1..116: mol_type = other RNA
  modified_base 1: mod_base = OTHER; note = 2'-O-methyl modified nucleotide with phosphorothioate linkage
  modified_base 2: mod_base = OTHER; note = 2'-O-methyl modified nucleotide with phosphorothioate linkage
  modified_base 3: mod_base = OTHER; note = 2'-O-methyl modified nucleotide with phosphorothioate linkage
  modified_base 29: mod_base = OTHER; note = 2'-O-methyl modified nucleotide
  modified_base 30: mod_base = OTHER; note = 2'-O-methyl modified nucleotide
  modified_base 31: mod_base = OTHER; note = 2'-O-methyl modified nucleotide
  modified_base 32: mod_base = OTHER; note = 2'-O-methyl modified nucleotide
  modified_base 33: mod_base = OTHER; note = 2'-O-methyl modified nucleotide
  modified_base 34: mod_base = OTHER; note = 2'-O-methyl modified nucleotide
  modified_base 35: mod_base = OTHER; note = 2'-O-methyl modified nucleotide
  modified_base 36: mod_base = OTHER; note = 2'-O-methyl modified nucleotide
  modified_base 37: mod_base = OTHER; note = 2'-O-methyl modified nucleotide
  modified_base 38: mod_base = OTHER; note = 2'-O-methyl modified nucleotide
  modified_base 39: mod_base = OTHER; note = 2'-O-methyl modified nucleotide
  modified_base 40: mod_base = OTHER; note = 2'-O-methyl modified nucleotide
  modified_base 69: mod_base = OTHER; note = 2'-O-methyl modified nucleotide
  modified_base 70: mod_base = OTHER; note = 2'-O-methyl modified nucleotide
  modified_base 71: mod_base = OTHER; note = 2'-O-methyl modified nucleotide
  modified_base 72: mod_base = OTHER; note = 2'-O-methyl modified nucleotide
  modified_base 73: mod_base = OTHER; note = 2'-O-methyl modified nucleotide
  modified_base 74: mod_base = OTHER; note = 2'-O-methyl modified nucleotide
  modified_base 75: mod_base = OTHER; note = 2'-O-methyl modified nucleotide
  modified_base 76: mod_base = OTHER; note = 2'-O-methyl modified nucleotide
  modified_base 77: mod_base = OTHER; note = 2'-O-methyl modified nucleotide
  modified_base 78: mod_base = OTHER; note = 2'-O-methyl modified nucleotide
  modified_base 79: mod_base = OTHER; note = 2'-O-methyl modified nucleotide
  modified_base 80: mod_base = OTHER; note = 2'-O-methyl modified nucleotide
  modified_base 81: mod_base = OTHER; note = 2'-O-methyl modified nucleotide
  modified_base 82: mod_base = OTHER; note = 2'-O-methyl modified nucleotide
  modified_base 83: mod_base = OTHER; note = 2'-O-methyl modified nucleotide
  modified_base 84: mod_base = OTHER; note = 2'-O-methyl modified nucleotide
  modified_base 85: mod_base = OTHER; note = 2'-O-methyl modified nucleotide
  modified_base 86: mod_base = OTHER; note = 2'-O-methyl modified nucleotide
  modified_base 87: mod_base = OTHER; note = 2'-O-methyl modified nucleotide
  modified_base 88: mod_base = OTHER; note = 2'-O-methyl modified nucleotide
  modified_base 89: mod_base = OTHER; note = 2'-O-methyl modified nucleotide
  modified_base 90: mod_base = OTHER; note = 2'-O-methyl modified nucleotide
  modified_base 91: mod_base = OTHER; note = 2'-O-methyl modified nucleotide
  modified_base 92: mod_base = OTHER; note = 2'-O-methyl modified nucleotide
  modified_base 93: mod_base = OTHER; note = 2'-O-methyl modified nucleotide
  modified_base 94: mod_base = OTHER; note = 2'-O-methyl modified nucleotide
  modified_base 95: mod_base = OTHER; note = 2'-O-methyl modified nucleotide
  modified_base 96: mod_base = OTHER; note = 2'-O-methyl modified nucleotide
  modified_base 113: mod_base = OTHER; note = Nucleotide with phosphorothioate linkage
  modified_base 114: mod_base = OTHER; note = 2'-O-methyl modified nucleotide with phosphorothioate linkage
  modified_base 115: mod_base = OTHER; note = 2'-O-methyl modified nucleotide with phosphorothioate linkage
  modified_base 116: mod_base = OTHER; note = 2'-O-methyl modified nucleotide
gagtagcgcgagcacagctagttttagagctagaaatagcaagttaaaataaggctagtccgttatcaacttgaaaaagtggcaccgagtcggtgcgccttagtgatgctgtgctc

SEQ ID NO: 17781 - RNA, 123 nt, synthetic construct
  source 1..123: mol_type = other RNA
  modified_base 1: mod_base = OTHER; note = 2'-O-methyl modified nucleotide with phosphorothioate linkage
  modified_base 2: mod_base = OTHER; note = 2'-O-methyl modified nucleotide with phosphorothioate linkage
  modified_base 3: mod_base = OTHER; note = 2'-O-methyl modified nucleotide with phosphorothioate linkage
  modified_base 29: mod_base = OTHER; note = 2'-O-methyl modified nucleotide
  modified_base 30: mod_base = OTHER; note = 2'-O-methyl modified nucleotide
  modified_base 31: mod_base = OTHER; note = 2'-O-methyl modified nucleotide
  modified_base 32: mod_base = OTHER; note = 2'-O-methyl modified nucleotide
  modified_base 33: mod_base = OTHER; note = 2'-O-methyl modified nucleotide
  modified_base 34: mod_base = OTHER; note = 2'-O-methyl modified nucleotide
  modified_base 35: mod_base = OTHER; note = 2'-O-methyl modified nucleotide
  modified_base 36: mod_base = OTHER; note = 2'-O-methyl modified nucleotide
  modified_base 37: mod_base = OTHER; note = 2'-O-methyl modified nucleotide
  modified_base 38: mod_base = OTHER; note = 2'-O-methyl modified nucleotide
  modified_base 39: mod_base = OTHER; note = 2'-O-methyl modified nucleotide
  modified_base 40: mod_base = OTHER; note = 2'-O-methyl modified nucleotide
  modified_base 69: mod_base = OTHER; note = 2'-O-methyl modified nucleotide
  modified_base 70: mod_base = OTHER; note = 2'-O-methyl modified nucleotide
  modified_base 71: mod_base = OTHER; note = 2'-O-methyl modified nucleotide
  modified_base 72: mod_base = OTHER; note = 2'-O-methyl modified nucleotide
  modified_base 73: mod_base = OTHER; note = 2'-O-methyl modified nucleotide
  modified_base 74: mod_base = OTHER; note = 2'-O-methyl modified nucleotide
  modified_base 75: mod_base = OTHER; note = 2'-O-methyl modified nucleotide
  modified_base 76: mod_base = OTHER; note = 2'-O-methyl modified nucleotide
  modified_base 77: mod_base = OTHER; note = 2'-O-methyl modified nucleotide
  modified_base 78: mod_base = OTHER; note = 2'-O-methyl modified nucleotide
  modified_base 79: mod_base = OTHER; note = 2'-O-methyl modified nucleotide
  modified_base 80: mod_base = OTHER; note = 2'-O-methyl modified nucleotide
  modified_base 81: mod_base = OTHER; note = 2'-O-methyl modified nucleotide
  modified_base 82: mod_base = OTHER; note = 2'-O-methyl modified nucleotide
  modified_base 83: mod_base = OTHER; note = 2'-O-methyl modified nucleotide
  modified_base 84: mod_base = OTHER; note = 2'-O-methyl modified nucleotide
  modified_base 85: mod_base = OTHER; note = 2'-O-methyl modified nucleotide
  modified_base 86: mod_base = OTHER; note = 2'-O-methyl modified nucleotide
  modified_base 87: mod_base = OTHER; note = 2'-O-methyl modified nucleotide
  modified_base 88: mod_base = OTHER; note = 2'-O-methyl modified nucleotide
  modified_base 89: mod_base = OTHER; note = 2'-O-methyl modified nucleotide
  modified_base 90: mod_base = OTHER; note = 2'-O-methyl modified nucleotide
  modified_base 91: mod_base = OTHER; note = 2'-O-methyl modified nucleotide
  modified_base 92: mod_base = OTHER; note = 2'-O-methyl modified nucleotide
  modified_base 93: mod_base = OTHER; note = 2'-O-methyl modified nucleotide
  modified_base 94: mod_base = OTHER; note = 2'-O-methyl modified nucleotide
  modified_base 95: mod_base = OTHER; note = 2'-O-methyl modified nucleotide
  modified_base 96: mod_base = OTHER; note = 2'-O-methyl modified nucleotide
  modified_base 120: mod_base = OTHER; note = Nucleotide with phosphorothioate linkage
  modified_base 121: mod_base = OTHER; note = 2'-O-methyl modified nucleotide with phosphorothioate linkage
  modified_base 122: mod_base = OTHER; note = 2'-O-methyl modified nucleotide with phosphorothioate linkage
  modified_base 123: mod_base = OTHER; note = 2'-O-methyl modified nucleotide
gagtagcgcgagcacagctagttttagagctagaaatagcaagttaaaataaggctagtccgttatcaacttgaaaaagtggcaccgagtcggtgctggccttagtgatgctgtgctcgcgct

SEQ ID NO: 17782 - RNA, 122 nt, synthetic construct
  source 1..122: mol_type = other RNA
  modified_base 1: mod_base = OTHER; note = 2'-O-methyl modified nucleotide with phosphorothioate linkage
  modified_base 2: mod_base = OTHER; note = 2'-O-methyl modified nucleotide with phosphorothioate linkage
  modified_base 3: mod_base = OTHER; note = 2'-O-methyl modified nucleotide with phosphorothioate linkage
  modified_base 29: mod_base = OTHER; note = 2'-O-methyl modified nucleotide
  modified_base 30: mod_base = OTHER; note = 2'-O-methyl modified nucleotide
  modified_base 31: mod_base = OTHER; note = 2'-O-methyl modified nucleotide
  modified_base 32: mod_base = OTHER; note = 2'-O-methyl modified nucleotide
  modified_base 33: mod_base = OTHER; note = 2'-O-methyl modified nucleotide
  modified_base 34: mod_base = OTHER; note = 2'-O-methyl modified nucleotide
  modified_base 35: mod_base = OTHER; note = 2'-O-methyl modified nucleotide
  modified_base 36: mod_base = OTHER; note = 2'-O-methyl modified nucleotide
  modified_base 37: mod_base = OTHER; note = 2'-O-methyl modified nucleotide
  modified_base 38: mod_base = OTHER; note = 2'-O-methyl modified nucleotide
  modified_base 39: mod_base = OTHER; note = 2'-O-methyl modified nucleotide
  modified_base 40: mod_base = OTHER; note = 2'-O-methyl modified nucleotide
  modified_base 69: mod_base = OTHER; note = 2'-O-methyl modified nucleotide
  modified_base 70: mod_base = OTHER; note = 2'-O-methyl modified nucleotide
  modified_base 71: mod_base = OTHER; note = 2'-O-methyl modified nucleotide
  modified_base 72: mod_base = OTHER; note = 2'-O-methyl modified nucleotide
  modified_base 73: mod_base = OTHER; note = 2'-O-methyl modified nucleotide
  modified_base 74: mod_base = OTHER; note = 2'-O-methyl modified nucleotide
  modified_base 75: mod_base = OTHER; note = 2'-O-methyl modified nucleotide
  modified_base 76: mod_base = OTHER; note = 2'-O-methyl modified nucleotide
  modified_base 77: mod_base = OTHER; note = 2'-O-methyl modified nucleotide
  modified_base 78: mod_base = OTHER; note = 2'-O-methyl modified nucleotide
  modified_base 79: mod_base = OTHER; note = 2'-O-methyl modified nucleotide
  modified_base 80: mod_base = OTHER; note = 2'-O-methyl modified nucleotide
  modified_base 81: mod_base = OTHER; note = 2'-O-methyl modified nucleotide
  modified_base 82: mod_base = OTHER; note = 2'-O-methyl modified nucleotide
  modified_base 83: mod_base = OTHER; note = 2'-O-methyl modified nucleotide
  modified_base 84: mod_base = OTHER; note = 2'-O-methyl modified nucleotide
  modified_base 85: mod_base = OTHER; note = 2'-O-methyl modified nucleotide
  modified_base 86: mod_base = OTHER; note = 2'-O-methyl modified nucleotide
  modified_base 87: mod_base = OTHER; note = 2'-O-methyl modified nucleotide
  modified_base 88: mod_base = OTHER; note = 2'-O-methyl modified nucleotide
  modified_base 89: mod_base = OTHER; note = 2'-O-methyl modified nucleotide
  modified_base 90: mod_base = OTHER; note = 2'-O-methyl modified nucleotide
  modified_base 91: mod_base = OTHER; note = 2'-O-methyl modified nucleotide
  modified_base 92: mod_base = OTHER; note = 2'-O-methyl modified nucleotide
  modified_base 93: mod_base = OTHER; note = 2'-O-methyl modified nucleotide
  modified_base 94: mod_base = OTHER; note = 2'-O-methyl modified nucleotide
  modified_base 95: mod_base = OTHER; note = 2'-O-methyl modified nucleotide
  modified_base 96: mod_base = OTHER; note = 2'-O-methyl modified nucleotide
  modified_base 119: mod_base = OTHER; note = Nucleotide with phosphorothioate linkage
  modified_base 120: mod_base = OTHER; note = 2'-O-methyl modified nucleotide with phosphorothioate linkage
  modified_base 121: mod_base = OTHER; note = 2'-O-methyl modified nucleotide with phosphorothioate linkage
  modified_base 122: mod_base = OTHER; note = 2'-O-methyl modified nucleotide
gagtagcgcgagcacagctagttttagagctagaaatagcaagttaaaataaggctagtccgttatcaacttgaaaaagtggcaccgagtcggtgctggccttagtgatgctgtgctcgcgc

SEQ ID NO: 17783 - RNA, 121 nt, synthetic construct
  source 1..121: mol_type = other RNA
  modified_base 1: mod_base = OTHER; note = 2'-O-methyl modified nucleotide with phosphorothioate linkage
  modified_base 2: mod_base = OTHER; note = 2'-O-methyl modified nucleotide with phosphorothioate linkage
  modified_base 3: mod_base = OTHER; note = 2'-O-methyl modified nucleotide with phosphorothioate linkage
  modified_base 29: mod_base = OTHER; note = 2'-O-methyl modified nucleotide
  modified_base 30: mod_base = OTHER; note = 2'-O-methyl modified nucleotide
  modified_base 31: mod_base = OTHER; note = 2'-O-methyl modified nucleotide
  modified_base 32: mod_base = OTHER; note = 2'-O-methyl modified nucleotide
  modified_base 33: mod_base = OTHER; note = 2'-O-methyl modified nucleotide
  modified_base 34: mod_base = OTHER; note = 2'-O-methyl modified nucleotide
  modified_base 35: mod_base = OTHER; note = 2'-O-methyl modified nucleotide
  modified_base 36: mod_base = OTHER; note = 2'-O-methyl modified nucleotide
  modified_base 37: mod_base = OTHER; note = 2'-O-methyl modified nucleotide
  modified_base 38: mod_base = OTHER; note = 2'-O-methyl modified nucleotide
  modified_base 39: mod_base = OTHER; note = 2'-O-methyl modified nucleotide
  modified_base 40: mod_base = OTHER; note = 2'-O-methyl modified nucleotide
  modified_base 69: mod_base = OTHER; note = 2'-O-methyl modified nucleotide
  modified_base 70: mod_base = OTHER; note = 2'-O-methyl modified nucleotide
  modified_base 71: mod_base = OTHER; note = 2'-O-methyl modified nucleotide
  modified_base 72: mod_base = OTHER; note = 2'-O-methyl modified nucleotide
  modified_base 73: mod_base = OTHER; note = 2'-O-methyl modified nucleotide
  modified_base 74: mod_base = OTHER; note = 2'-O-methyl modified nucleotide
  modified_base 75: mod_base = OTHER; note = 2'-O-methyl modified nucleotide
  modified_base 76: mod_base = OTHER; note = 2'-O-methyl modified nucleotide
  modified_base 77: mod_base = OTHER; note = 2'-O-methyl modified nucleotide
  modified_base 78: mod_base = OTHER; note = 2'-O-methyl modified nucleotide
  modified_base 79: mod_base = OTHER; note = 2'-O-methyl modified nucleotide
  modified_base 80: mod_base = OTHER; note = 2'-O-methyl modified nucleotide
  modified_base 81: mod_base = OTHER; note = 2'-O-methyl modified nucleotide
  modified_base 82: mod_base = OTHER; note = 2'-O-methyl modified nucleotide
  modified_base 83: mod_base = OTHER; note = 2'-O-methyl modified nucleotide
  modified_base 84: mod_base = OTHER; note = 2'-O-methyl modified nucleotide
  modified_base 85: mod_base = OTHER; note = 2'-O-methyl modified nucleotide
  modified_base 86: mod_base = OTHER; note = 2'-O-methyl modified nucleotide
  modified_base 87: mod_base = OTHER; note = 2'-O-methyl modified nucleotide
  modified_base 88: mod_base = OTHER; note = 2'-O-methyl modified nucleotide
  modified_base 89: mod_base = OTHER; note = 2'-O-methyl modified nucleotide
  modified_base 90: mod_base = OTHER; note = 2'-O-methyl modified nucleotide
  modified_base 91: mod_base = OTHER; note = 2'-O-methyl modified nucleotide
  modified_base 92: mod_base = OTHER; note = 2'-O-methyl modified nucleotide
  modified_base 93: mod_base = OTHER; note = 2'-O-methyl modified nucleotide
  modified_base 94: mod_base = OTHER; note = 2'-O-methyl modified nucleotide
  modified_base 95: mod_base = OTHER; note = 2'-O-methyl modified nucleotide
  modified_base 96: mod_base = OTHER; note = 2'-O-methyl modified nucleotide
  modified_base 118: mod_base = OTHER; note = Nucleotide with phosphorothioate linkage
  modified_base 119: mod_base = OTHER; note = 2'-O-methyl modified nucleotide with phosphorothioate linkage
  modified_base 120: mod_base = OTHER; note = 2'-O-methyl modified nucleotide with phosphorothioate linkage
  modified_base 121: mod_base = OTHER; note = 2'-O-methyl modified nucleotide
gagtagcgcgagcacagctagttttagagctagaaatagcaagttaaaataaggctagtccgttatcaacttgaaaaagtggcaccgagtcggtgctggccttagtgatgctgtgctcgcg

SEQ ID NO: 17784 - RNA, 120 nt, synthetic construct
  source 1..120: mol_type = other RNA
  modified_base 1: mod_base = OTHER; note = 2'-O-methyl modified nucleotide with phosphorothioate linkage
  modified_base 2: mod_base = OTHER; note = 2'-O-methyl modified nucleotide with phosphorothioate linkage
  modified_base 3: mod_base = OTHER; note = 2'-O-methyl modified nucleotide with phosphorothioate linkage
  modified_base 29: mod_base = OTHER; note = 2'-O-methyl modified nucleotide
  modified_base 30: mod_base = OTHER; note = 2'-O-methyl modified nucleotide
  modified_base 31: mod_base = OTHER; note = 2'-O-methyl modified nucleotide
  modified_base 32: mod_base = OTHER; note = 2'-O-methyl modified nucleotide
  modified_base 33: mod_base = OTHER; note = 2'-O-methyl modified nucleotide
  modified_base 34: mod_base = OTHER; note = 2'-O-methyl modified nucleotide
  modified_base 35: mod_base = OTHER; note = 2'-O-methyl modified nucleotide
  modified_base 36: mod_base = OTHER; note = 2'-O-methyl modified nucleotide
  modified_base 37: mod_base = OTHER; note = 2'-O-methyl modified nucleotide
  modified_base 38: mod_base = OTHER; note = 2'-O-methyl modified nucleotide
  modified_base 39: mod_base = OTHER; note = 2'-O-methyl modified nucleotide
  modified_base 40: mod_base = OTHER; note = 2'-O-methyl modified nucleotide
  modified_base 69: mod_base = OTHER; note = 2'-O-methyl modified nucleotide
  modified_base 70: mod_base = OTHER; note = 2'-O-methyl modified nucleotide
  modified_base 71: mod_base = OTHER; note = 2'-O-methyl modified nucleotide
  modified_base 72: mod_base = OTHER; note = 2'-O-methyl modified nucleotide
  modified_base 73: mod_base = OTHER; note = 2'-O-methyl modified nucleotide
  modified_base 74: mod_base = OTHER; note = 2'-O-methyl modified nucleotide
  modified_base 75: mod_base = OTHER; note = 2'-O-methyl modified nucleotide
  modified_base 76: mod_base = OTHER; note = 2'-O-methyl modified nucleotide
  modified_base 77: mod_base = OTHER; note = 2'-O-methyl modified nucleotide
  modified_base 78: mod_base = OTHER; note = 2'-O-methyl modified nucleotide
  modified_base 79: mod_base = OTHER; note = 2'-O-methyl modified nucleotide
  modified_base 80: mod_base = OTHER; note = 2'-O-methyl modified nucleotide
  modified_base 81: mod_base = OTHER; note = 2'-O-methyl modified nucleotide
  modified_base 82: mod_base = OTHER; note = 2'-O-methyl modified nucleotide
  modified_base 83: mod_base = OTHER; note = 2'-O-methyl modified nucleotide
  modified_base 84: mod_base = OTHER; note = 2'-O-methyl modified nucleotide
  modified_base 85: mod_base = OTHER; note = 2'-O-methyl modified nucleotide
  modified_base 86: mod_base = OTHER; note = 2'-O-methyl modified nucleotide
  modified_base 87: mod_base = OTHER; note = 2'-O-methyl modified nucleotide
  modified_base 88: mod_base = OTHER; note = 2'-O-methyl modified nucleotide
  modified_base 89: mod_base = OTHER; note = 2'-O-methyl modified nucleotide
  modified_base 90: mod_base = OTHER; note = 2'-O-methyl modified nucleotide
  modified_base 91: mod_base = OTHER; note = 2'-O-methyl modified nucleotide
  modified_base 92: mod_base = OTHER; note = 2'-O-methyl modified nucleotide
  modified_base 93: mod_base = OTHER; note = 2'-O-methyl modified nucleotide
  modified_base 94: mod_base = OTHER; note = 2'-O-methyl modified nucleotide
  modified_base 95: mod_base = OTHER; note = 2'-O-methyl modified nucleotide
  modified_base 96: mod_base = OTHER; note = 2'-O-methyl modified nucleotide
  modified_base 117: mod_base = OTHER; note = Nucleotide with phosphorothioate linkage
  modified_base 118: mod_base = OTHER; note = 2'-O-methyl modified nucleotide with phosphorothioate linkage
  modified_base 119: mod_base = OTHER; note = 2'-O-methyl modified nucleotide with phosphorothioate linkage
  modified_base 120: mod_base = OTHER; note = 2'-O-methyl modified nucleotide
gagtagcgcgagcacagctagttttagagctagaaatagcaagttaaaataaggctagtccgttatcaacttgaaaaagtggcaccgagtcggtgctggccttagtgatgctgtgctcgc

SEQ ID NO: 17785 - RNA, 119 nt, synthetic construct
  source 1..119: mol_type = other RNA
  modified_base 1: mod_base = OTHER; note = 2'-O-methyl modified nucleotide with phosphorothioate linkage
  modified_base 2: mod_base = OTHER; note = 2'-O-methyl modified nucleotide with phosphorothioate linkage
  modified_base 3: mod_base = OTHER; note = 2'-O-methyl modified nucleotide with phosphorothioate linkage
  modified_base 29: mod_base = OTHER; note = 2'-O-methyl modified nucleotide
  modified_base 30: mod_base = OTHER; note = 2'-O-methyl modified nucleotide
  modified_base 31: mod_base = OTHER; note = 2'-O-methyl modified nucleotide
  modified_base 32: mod_base = OTHER; note = 2'-O-methyl modified nucleotide
  modified_base 33: mod_base = OTHER; note = 2'-O-methyl modified nucleotide
  modified_base 34: mod_base = OTHER; note = 2'-O-methyl modified nucleotide
  modified_base 35: mod_base = OTHER; note = 2'-O-methyl modified nucleotide
  modified_base 36: mod_base = OTHER; note = 2'-O-methyl modified nucleotide
  modified_base 37: mod_base = OTHER; note = 2'-O-methyl modified nucleotide
  modified_base 38: mod_base = OTHER; note = 2'-O-methyl modified nucleotide
  modified_base 39: mod_base = OTHER; note = 2'-O-methyl modified nucleotide
  modified_base 40: mod_base = OTHER; note = 2'-O-methyl modified nucleotide
  modified_base 69: mod_base = OTHER; note = 2'-O-methyl modified nucleotide
  modified_base 70: mod_base = OTHER; note = 2'-O-methyl modified nucleotide
  modified_base 71: mod_base = OTHER; note = 2'-O-methyl modified nucleotide
  modified_base 72: mod_base = OTHER; note = 2'-O-methyl modified nucleotide
  modified_base 73: mod_base = OTHER; note = 2'-O-methyl modified nucleotide
  modified_base 74: mod_base = OTHER; note = 2'-O-methyl modified nucleotide
  modified_base 75: mod_base = OTHER; note = 2'-O-methyl modified nucleotide
  modified_base 76: mod_base = OTHER; note = 2'-O-methyl modified nucleotide
  modified_base 77: mod_base = OTHER; note = 2'-O-methyl modified nucleotide
  modified_base 78: mod_base = OTHER; note = 2'-O-methyl modified nucleotide
  modified_base 79: mod_base = OTHER; note = 2'-O-methyl modified nucleotide
  modified_base 80: mod_base = OTHER; note = 2'-O-methyl modified nucleotide
  modified_base 81: mod_base = OTHER; note = 2'-O-methyl modified nucleotide
  modified_base 82: mod_base = OTHER; note = 2'-O-methyl modified nucleotide
  modified_base 83: mod_base = OTHER; note = 2'-O-methyl modified nucleotide
  modified_base 84: mod_base = OTHER; note = 2'-O-methyl modified nucleotide
  modified_base 85: mod_base = OTHER; note = 2'-O-methyl modified nucleotide
  modified_base 86: mod_base = OTHER; note = 2'-O-methyl modified nucleotide
  modified_base 87: mod_base = OTHER; note = 2'-O-methyl modified nucleotide
  modified_base 88: mod_base = OTHER; note = 2'-O-methyl modified nucleotide
  modified_base 89: mod_base = OTHER; note = 2'-O-methyl modified nucleotide
  modified_base 90: mod_base = OTHER; note = 2'-O-methyl modified nucleotide
  modified_base 91: mod_base = OTHER; note = 2'-O-methyl modified nucleotide
  modified_base 92: mod_base = OTHER; note = 2'-O-methyl modified nucleotide
  modified_base 93: mod_base = OTHER; note = 2'-O-methyl modified nucleotide
  modified_base 94: mod_base = OTHER; note = 2'-O-methyl modified nucleotide
  modified_base 95: mod_base = OTHER; note = 2'-O-methyl modified nucleotide
  modified_base 96: mod_base = OTHER; note = 2'-O-methyl modified nucleotide
  modified_base 116: mod_base = OTHER; note = Nucleotide with phosphorothioate linkage
  modified_base 117: mod_base = OTHER; note = 2'-O-methyl modified nucleotide with phosphorothioate linkage
  modified_base 118: mod_base = OTHER; note = 2'-O-methyl modified nucleotide with phosphorothioate linkage
  modified_base 119: mod_base = OTHER; note = 2'-O-methyl modified nucleotide
gagtagcgcgagcacagctagttttagagctagaaatagcaagttaaaataaggctagtccgttatcaacttgaaaaagtggcaccgagtcggtgctggccttagtgatgctgtgctcg

SEQ ID NO: 17786 - RNA, 118 nt, synthetic construct
  source 1..118: mol_type = other RNA
  modified_base 1: mod_base = OTHER; note = 2'-O-methyl modified nucleotide with phosphorothioate linkage
  modified_base 2: mod_base = OTHER; note = 2'-O-methyl modified nucleotide with phosphorothioate linkage
  modified_base 3: mod_base = OTHER; note = 2'-O-methyl modified nucleotide with phosphorothioate linkage
  modified_base 29: mod_base = OTHER; note = 2'-O-methyl modified nucleotide
  modified_base 30: mod_base = OTHER; note = 2'-O-methyl modified nucleotide
  modified_base 31: mod_base = OTHER; note = 2'-O-methyl modified nucleotide
  modified_base 32: mod_base = OTHER; note = 2'-O-methyl modified nucleotide
  modified_base 33: mod_base = OTHER; note = 2'-O-methyl modified nucleotide
  modified_base 34: mod_base = OTHER; note = 2'-O-methyl modified nucleotide
  modified_base 35: mod_base = OTHER; note = 2'-O-methyl modified nucleotide
  modified_base 36: mod_base = OTHER; note = 2'-O-methyl modified nucleotide
  modified_base 37: mod_base = OTHER; note = 2'-O-methyl modified nucleotide
  modified_base 38: mod_base = OTHER; note = 2'-O-methyl modified nucleotide
  modified_base 39: mod_base = OTHER; note = 2'-O-methyl modified nucleotide
  modified_base 40: mod_base = OTHER; note = 2'-O-methyl modified nucleotide
  modified_base 69: mod_base = OTHER; note = 2'-O-methyl modified nucleotide
  modified_base 70: mod_base = OTHER; note = 2'-O-methyl modified nucleotide
  modified_base 71: mod_base = OTHER; note = 2'-O-methyl modified nucleotide
  modified_base 72: mod_base = OTHER; note = 2'-O-methyl modified nucleotide
  modified_base 73: mod_base = OTHER; note = 2'-O-methyl modified nucleotide
  modified_base 74: mod_base = OTHER; note = 2'-O-methyl modified nucleotide
  modified_base 75: mod_base = OTHER; note = 2'-O-methyl modified nucleotide
  modified_base 76: mod_base = OTHER; note = 2'-O-methyl modified nucleotide
  modified_base 77: mod_base = OTHER; note = 2'-O-methyl modified nucleotide
  modified_base 78: mod_base = OTHER; note = 2'-O-methyl modified nucleotide
  modified_base 79: mod_base = OTHER; note = 2'-O-methyl modified nucleotide
  modified_base 80: mod_base = OTHER; note = 2'-O-methyl modified nucleotide
  modified_base 81: mod_base = OTHER; note = 2'-O-methyl modified nucleotide
  modified_base 82: mod_base = OTHER; note = 2'-O-methyl modified nucleotide
  modified_base 83: mod_base = OTHER; note = 2'-O-methyl modified nucleotide
  modified_base 84: mod_base = OTHER; note = 2'-O-methyl modified nucleotide
  modified_base 85: mod_base = OTHER; note = 2'-O-methyl modified nucleotide
  modified_base 86: mod_base = OTHER; note = 2'-O-methyl modified nucleotide
  modified_base 87: mod_base = OTHER; note = 2'-O-methyl modified nucleotide
  modified_base 88: mod_base = OTHER; note = 2'-O-methyl modified nucleotide
  modified_base 89: mod_base = OTHER; note = 2'-O-methyl modified nucleotide
  modified_base 90: mod_base = OTHER; note = 2'-O-methyl modified nucleotide
  modified_base 91: mod_base = OTHER; note = 2'-O-methyl modified nucleotide
  modified_base 92: mod_base = OTHER; note = 2'-O-methyl modified nucleotide
  modified_base 93: mod_base = OTHER; note = 2'-O-methyl modified nucleotide
  modified_base 94: mod_base = OTHER; note = 2'-O-methyl modified nucleotide
  modified_base 95: mod_base = OTHER; note = 2'-O-methyl modified nucleotide
  modified_base 96: mod_base = OTHER; note = 2'-O-methyl modified nucleotide
  modified_base 115: mod_base = OTHER; note = Nucleotide with phosphorothioate linkage
  modified_base 116: mod_base = OTHER; note = 2'-O-methyl modified nucleotide with phosphorothioate linkage
  modified_base 117: mod_base = OTHER; note = 2'-O-methyl modified nucleotide with phosphorothioate linkage
  modified_base 118: mod_base = OTHER; note = 2'-O-methyl modified nucleotide
gagtagcgcgagcacagctagttttagagctagaaatagcaagttaaaataaggctagtccgttatcaacttgaaaaagtggcaccgagtcggtgctggccttagtgatgctgtgctc

SEQ ID NO: 17787 - RNA, 125 nt, synthetic construct
  source 1..125: mol_type = other RNA
  modified_base 1: mod_base = OTHER; note = 2'-O-methyl modified nucleotide with phosphorothioate linkage
  modified_base 2: mod_base = OTHER; note = 2'-O-methyl modified nucleotide with phosphorothioate linkage
  modified_base 3: mod_base = OTHER; note = 2'-O-methyl modified nucleotide with phosphorothioate linkage
  modified_base 29: mod_base = OTHER; note = 2'-O-methyl modified nucleotide
  modified_base 30: mod_base = OTHER; note = 2'-O-methyl modified nucleotide
  modified_base 31: mod_base = OTHER; note = 2'-O-methyl modified nucleotide
  modified_base 32: mod_base = OTHER; note = 2'-O-methyl modified nucleotide
  modified_base 33: mod_base = OTHER; note = 2'-O-methyl modified nucleotide
  modified_base 34: mod_base = OTHER; note = 2'-O-methyl modified nucleotide
  modified_base 35: mod_base = OTHER; note = 2'-O-methyl modified nucleotide
  modified_base 36: mod_base = OTHER; note = 2'-O-methyl modified nucleotide
  modified_base 37: mod_base = OTHER; note = 2'-O-methyl modified nucleotide
  modified_base 38: mod_base = OTHER; note = 2'-O-methyl modified nucleotide
  modified_base 39: mod_base = OTHER; note = 2'-O-methyl modified nucleotide
  modified_base 40: mod_base = OTHER; note = 2'-O-methyl modified nucleotide
  modified_base 69: mod_base = OTHER; note = 2'-O-methyl modified nucleotide
  modified_base 70: mod_base = OTHER; note = 2'-O-methyl modified nucleotide
  modified_base 71: mod_base = OTHER; note = 2'-O-methyl modified nucleotide
  modified_base 72: mod_base = OTHER; note = 2'-O-methyl modified nucleotide
  modified_base 73: mod_base = OTHER; note = 2'-O-methyl modified nucleotide
  modified_base 74: mod_base = OTHER; note = 2'-O-methyl modified nucleotide
  modified_base 75: mod_base = OTHER; note = 2'-O-methyl modified nucleotide
  modified_base 76: mod_base = OTHER; note = 2'-O-methyl modified nucleotide
  modified_base 77: mod_base = OTHER; note = 2'-O-methyl modified nucleotide
  modified_base 78: mod_base = OTHER; note = 2'-O-methyl modified nucleotide
  modified_base 79: mod_base = OTHER; note = 2'-O-methyl modified nucleotide
  modified_base 80: mod_base = OTHER; note = 2'-O-methyl modified nucleotide
  modified_base 81: mod_base = OTHER; note = 2'-O-methyl modified nucleotide
  modified_base 82: mod_base = OTHER; note = 2'-O-methyl modified nucleotide
  modified_base 83: mod_base = OTHER; note = 2'-O-methyl modified nucleotide
  modified_base 84: mod_base = OTHER; note = 2'-O-methyl modified nucleotide
  modified_base 85: mod_base = OTHER; note = 2'-O-methyl modified nucleotide
  modified_base 86: mod_base = OTHER; note = 2'-O-methyl modified nucleotide
  modified_base 87: mod_base = OTHER; note = 2'-O-methyl modified nucleotide
  modified_base 88: mod_base = OTHER; note = 2'-O-methyl modified nucleotide
  modified_base 89: mod_base = OTHER; note = 2'-O-methyl modified nucleotide
  modified_base 90: mod_base = OTHER; note = 2'-O-methyl modified nucleotide
  modified_base 91: mod_base = OTHER; note = 2'-O-methyl modified nucleotide
  modified_base 92: mod_base = OTHER; note = 2'-O-methyl modified nucleotide
  modified_base 93: mod_base = OTHER; note = 2'-O-methyl modified nucleotide
  modified_base 94: mod_base = OTHER; note = 2'-O-methyl modified nucleotide
  modified_base 95: mod_base = OTHER; note = 2'-O-methyl modified nucleotide
  modified_base 96: mod_base = OTHER; note = 2'-O-methyl modified nucleotide
  modified_base 122: mod_base = OTHER; note = Nucleotide with phosphorothioate linkage
  modified_base 123: mod_base = OTHER; note = 2'-O-methyl modified nucleotide with phosphorothioate linkage
  modified_base 124: mod_base = OTHER; note = 2'-O-methyl modified nucleotide with phosphorothioate linkage
  modified_base 125: mod_base = OTHER; note = 2'-O-methyl modified nucleotide
gagtagcgcgagcacagctagttttagagctagaaatagcaagttaaaataaggctagtccgttatcaacttgaaaaagtggcaccgagtcggtgccgtggccttagtgatgctgtgctcgcgct

SEQ ID NO: 17788 - RNA, 124 nt, synthetic construct
  source 1..124: mol_type = other RNA
  modified_base 1: mod_base = OTHER; note = 2'-O-methyl modified nucleotide with phosphorothioate linkage
  modified_base 2: mod_base = OTHER; note = 2'-O-methyl modified nucleotide with phosphorothioate linkage
  modified_base 3: mod_base = OTHER; note = 2'-O-methyl modified nucleotide with phosphorothioate linkage
  modified_base 29: mod_base = OTHER; note = 2'-O-methyl modified nucleotide
  modified_base 30: mod_base = OTHER; note = 2'-O-methyl modified nucleotide
  modified_base 31: mod_base = OTHER; note = 2'-O-methyl modified nucleotide
  modified_base 32: mod_base = OTHER; note = 2'-O-methyl modified nucleotide
  modified_base 33: mod_base = OTHER; note = 2'-O-methyl modified nucleotide
  modified_base 34: mod_base = OTHER; note = 2'-O-methyl modified nucleotide
  modified_base 35: mod_base = OTHER; note = 2'-O-methyl modified nucleotide
  modified_base 36: mod_base = OTHER; note = 2'-O-methyl modified nucleotide
  modified_base 37: mod_base = OTHER; note = 2'-O-methyl modified nucleotide
  modified_base 38: mod_base = OTHER; note = 2'-O-methyl modified nucleotide
  modified_base 39: mod_base = OTHER; note = 2'-O-methyl modified nucleotide
  modified_base 40: mod_base = OTHER; note = 2'-O-methyl modified nucleotide
  modified_base 69: mod_base = OTHER; note = 2'-O-methyl modified nucleotide
  modified_base 70: mod_base = OTHER; note = 2'-O-methyl modified nucleotide
  modified_base 71: mod_base = OTHER; note = 2'-O-methyl modified nucleotide
  modified_base 72: mod_base = OTHER; note = 2'-O-methyl modified nucleotide
  modified_base 73: mod_base = OTHER; note = 2'-O-methyl modified nucleotide
  modified_base 74: mod_base = OTHER; note = 2'-O-methyl modified nucleotide
  modified_base 75: mod_base = OTHER; note = 2'-O-methyl modified nucleotide
  modified_base 76: mod_base = OTHER; note = 2'-O-methyl modified nucleotide
  modified_base 77: mod_base = OTHER; note = 2'-O-methyl modified nucleotide
  modified_base 78: mod_base = OTHER; note = 2'-O-methyl modified nucleotide
  modified_base 79: mod_base = OTHER; note = 2'-O-methyl modified nucleotide
  modified_base 80: mod_base = OTHER; note = 2'-O-methyl modified nucleotide
  modified_base 81: mod_base = OTHER; note = 2'-O-methyl modified nucleotide
  modified_base 82: mod_base = OTHER; note = 2'-O-methyl modified nucleotide
  modified_base 83: mod_base = OTHER; note = 2'-O-methyl modified nucleotide
  modified_base 84: mod_base = OTHER; note = 2'-O-methyl modified nucleotide
  modified_base 85: mod_base = OTHER; note = 2'-O-methyl modified nucleotide
  modified_base 86: mod_base = OTHER; note = 2'-O-methyl modified nucleotide
  modified_base 87: mod_base = OTHER; note = 2'-O-methyl modified nucleotide
  modified_base 88: mod_base = OTHER; note = 2'-O-methyl modified nucleotide
  modified_base 89: mod_base = OTHER; note = 2'-O-methyl modified nucleotide
  modified_base 90: mod_base = OTHER; note = 2'-O-methyl modified nucleotide
  modified_base 91: mod_base = OTHER; note = 2'-O-methyl modified nucleotide
  modified_base 92: mod_base = OTHER; note = 2'-O-methyl modified nucleotide
  modified_base 93: mod_base = OTHER; note = 2'-O-methyl modified nucleotide
  modified_base 94: mod_base = OTHER; note = 2'-O-methyl modified nucleotide
  modified_base 95: mod_base = OTHER; note = 2'-O-methyl modified nucleotide
  modified_base 96: mod_base = OTHER; note = 2'-O-methyl modified nucleotide
  modified_base 121: mod_base = OTHER; note = Nucleotide with phosphorothioate linkage
  modified_base 122: mod_base = OTHER; note = 2'-O-methyl modified nucleotide with phosphorothioate linkage
  modified_base 123: mod_base = OTHER; note = 2'-O-methyl modified nucleotide with phosphorothioate linkage
  modified_base 124: mod_base = OTHER; note = 2'-O-methyl modified nucleotide
gagtagcgcgagcacagctagttttagagctagaaatagcaagttaaaataaggctagtccgttatcaacttgaaaaagtggcaccgagtcggtgccgtggccttagtgatgctgtgctcgcgc

SEQ ID NO: 17789 - RNA, 123 nt, synthetic construct
  source 1..123: mol_type = other RNA
  modified_base 1: mod_base = OTHER; note = 2'-O-methyl modified nucleotide with phosphorothioate linkage
  modified_base 2: mod_base = OTHER; note = 2'-O-methyl modified nucleotide with phosphorothioate linkage
  modified_base 3: mod_base = OTHER; note = 2'-O-methyl modified nucleotide with phosphorothioate linkage
  modified_base 29: mod_base = OTHER; note = 2'-O-methyl modified nucleotide
  modified_base 30: mod_base = OTHER; note = 2'-O-methyl modified nucleotide
  modified_base 31: mod_base = OTHER; note = 2'-O-methyl modified nucleotide
  modified_base 32: mod_base = OTHER; note = 2'-O-methyl modified nucleotide
  modified_base 33: mod_base = OTHER; note = 2'-O-methyl modified nucleotide
  modified_base 34: mod_base = OTHER; note = 2'-O-methyl modified nucleotide
  modified_base 35: mod_base = OTHER; note = 2'-O-methyl modified nucleotide
  modified_base 36: mod_base = OTHER; note = 2'-O-methyl modified nucleotide
  modified_base 37: mod_base = OTHER; note = 2'-O-methyl modified nucleotide
  modified_base 38: mod_base = OTHER; note = 2'-O-methyl modified nucleotide
  modified_base 39: mod_base = OTHER; note = 2'-O-methyl modified nucleotide
  modified_base 40: mod_base = OTHER; note = 2'-O-methyl modified nucleotide
  modified_base 69: mod_base = OTHER; note = 2'-O-methyl modified nucleotide
  modified_base 70: mod_base = OTHER; note = 2'-O-methyl modified nucleotide
  modified_base 71: mod_base = OTHER; note = 2'-O-methyl modified nucleotide
  modified_base 72: mod_base = OTHER; note = 2'-O-methyl modified nucleotide
  modified_base 73: mod_base = OTHER; note = 2'-O-methyl modified nucleotide
  modified_base 74: mod_base = OTHER; note = 2'-O-methyl modified nucleotide
  modified_base 75: mod_base = OTHER; note = 2'-O-methyl modified nucleotide
  modified_base 76: mod_base = OTHER; note = 2'-O-methyl modified nucleotide
  modified_base 77: mod_base = OTHER; note = 2'-O-methyl modified nucleotide
  modified_base 78: mod_base = OTHER; note = 2'-O-methyl modified nucleotide
  modified_base 79: mod_base = OTHER; note = 2'-O-methyl modified nucleotide
  modified_base 80: mod_base = OTHER; note = 2'-O-methyl modified nucleotide
  modified_base 81: mod_base = OTHER; note = 2'-O-methyl modified nucleotide
  modified_base 82: mod_base = OTHER; note = 2'-O-methyl modified nucleotide
  modified_base 83: mod_base = OTHER; note = 2'-O-methyl modified nucleotide
  modified_base 84: mod_base = OTHER; note = 2'-O-methyl modified nucleotide
  modified_base 85: mod_base = OTHER; note = 2'-O-methyl modified nucleotide
  modified_base 86: mod_base = OTHER; note = 2'-O-methyl modified nucleotide
  modified_base 87: mod_base = OTHER; note = 2'-O-methyl modified nucleotide
  modified_base 88: mod_base = OTHER; note = 2'-O-methyl modified nucleotide
  modified_base 89: mod_base = OTHER; note = 2'-O-methyl modified nucleotide
  modified_base 90: mod_base = OTHER; note = 2'-O-methyl modified nucleotide
  modified_base 91: mod_base = OTHER; note = 2'-O-methyl modified nucleotide
  modified_base 92: mod_base = OTHER; note = 2'-O-methyl modified nucleotide
  modified_base 93: mod_base = OTHER; note = 2'-O-methyl modified nucleotide
  modified_base 94: mod_base = OTHER; note = 2'-O-methyl modified nucleotide
  modified_base 95: mod_base = OTHER; note = 2'-O-methyl modified nucleotide
  modified_base 96: mod_base = OTHER; note = 2'-O-methyl modified nucleotide
  modified_base 120: mod_base = OTHER; note = Nucleotide with phosphorothioate linkage
  modified_base 121: mod_base = OTHER; note = 2'-O-methyl modified nucleotide with phosphorothioate linkage
  modified_base 122: mod_base = OTHER; note = 2'-O-methyl modified nucleotide with phosphorothioate linkage
  modified_base 123: mod_base = OTHER; note = 2'-O-methyl modified nucleotide
gagtagcgcgagcacagctagttttagagctagaaatagcaagttaaaataaggctagtccgttatcaacttgaaaaagtggcaccgagtcggtgccgtggccttagtgatgctgtgctcgcg

SEQ ID NO: 17790 - RNA, 122 nt, synthetic construct
  source 1..122: mol_type = other RNA
  modified_base 1: mod_base = OTHER; note = 2'-O-methyl modified nucleotide with phosphorothioate linkage
  modified_base 2: mod_base = OTHER; note = 2'-O-methyl modified nucleotide with phosphorothioate linkage
  modified_base 3: mod_base = OTHER; note = 2'-O-methyl modified nucleotide with phosphorothioate linkage
  modified_base 29: mod_base = OTHER; note = 2'-O-methyl modified nucleotide
  modified_base 30: mod_base = OTHER; note = 2'-O-methyl modified nucleotide
  modified_base 31: mod_base = OTHER; note = 2'-O-methyl modified nucleotide
  modified_base 32: mod_base = OTHER; note = 2'-O-methyl modified nucleotide
  modified_base 33: mod_base = OTHER; note = 2'-O-methyl modified nucleotide
  modified_base 34: mod_base = OTHER; note = 2'-O-methyl modified nucleotide
  modified_base 35: mod_base = OTHER; note = 2'-O-methyl modified nucleotide
  modified_base 36: mod_base = OTHER; note = 2'-O-methyl modified nucleotide
  modified_base 37: mod_base = OTHER; note = 2'-O-methyl modified nucleotide
  modified_base 38: mod_base = OTHER; note = 2'-O-methyl modified nucleotide
  modified_base 39: mod_base = OTHER; note = 2'-O-methyl modified nucleotide
  modified_base 40: mod_base = OTHER; note = 2'-O-methyl modified nucleotide
  modified_base 69: mod_base = OTHER; note = 2'-O-methyl modified nucleotide
  modified_base 70: mod_base = OTHER; note = 2'-O-methyl modified nucleotide
  modified_base 71: mod_base = OTHER; note = 2'-O-methyl modified nucleotide
  modified_base 72: mod_base = OTHER; note = 2'-O-methyl modified nucleotide
  modified_base 73: mod_base = OTHER; note = 2'-O-methyl modified nucleotide
  modified_base 74: mod_base = OTHER; note = 2'-O-methyl modified nucleotide
  modified_base 75: mod_base = OTHER; note = 2'-O-methyl modified nucleotide
  modified_base 76: mod_base = OTHER; note = 2'-O-methyl modified nucleotide
  modified_base 77: mod_base = OTHER; note = 2'-O-methyl modified nucleotide
  modified_base 78: mod_base = OTHER; note = 2'-O-methyl modified nucleotide
  modified_base 79: mod_base = OTHER; note = 2'-O-methyl modified nucleotide
  modified_base 80: mod_base = OTHER; note = 2'-O-methyl modified nucleotide
  modified_base 81: mod_base = OTHER; note = 2'-O-methyl modified nucleotide
  modified_base 82: mod_base = OTHER; note = 2'-O-methyl modified nucleotide
  modified_base 83: mod_base = OTHER; note = 2'-O-methyl modified nucleotide
  modified_base 84: mod_base = OTHER; note = 2'-O-methyl modified nucleotide
  modified_base 85: mod_base = OTHER; note = 2'-O-methyl modified nucleotide
  modified_base 86: mod_base = OTHER; note = 2'-O-methyl modified nucleotide
  modified_base 87: mod_base = OTHER; note = 2'-O-methyl modified nucleotide
  modified_base 88: mod_base = OTHER; note = 2'-O-methyl modified nucleotide
  modified_base 89: mod_base = OTHER; note = 2'-O-methyl modified nucleotide
  modified_base 90: mod_base = OTHER; note = 2'-O-methyl modified nucleotide
  modified_base 91: mod_base = OTHER; note = 2'-O-methyl modified nucleotide
  modified_base 92: mod_base = OTHER; note = 2'-O-methyl modified nucleotide
  modified_base 93: mod_base = OTHER; note = 2'-O-methyl modified nucleotide
  modified_base 94: mod_base = OTHER; note = 2'-O-methyl modified nucleotide
  modified_base 95: mod_base = OTHER; note = 2'-O-methyl modified nucleotide
  modified_base 96: mod_base = OTHER; note = 2'-O-methyl modified nucleotide
  modified_base 119: mod_base = OTHER; note = Nucleotide with phosphorothioate linkage
  modified_base 120: mod_base = OTHER; note = 2'-O-methyl modified nucleotide with phosphorothioate linkage
  modified_base 121: mod_base = OTHER; note = 2'-O-methyl modified nucleotide with phosphorothioate linkage
  modified_base 122: mod_base = OTHER; note = 2'-O-methyl modified nucleotide
gagtagcgcgagcacagctagttttagagctagaaatagcaagttaaaataaggctagtccgttatcaacttgaaaaagtggcaccgagtcggtgccgtggccttagtgatgctgtgctcgc

SEQ ID NO: 17791 - RNA, 121 nt, synthetic construct
  source 1..121: mol_type = other RNA
  modified_base 1: mod_base = OTHER; note = 2'-O-methyl modified nucleotide with phosphorothioate linkage
  modified_base 2: mod_base = OTHER; note = 2'-O-methyl modified nucleotide with phosphorothioate linkage
  modified_base 3: mod_base = OTHER; note = 2'-O-methyl modified nucleotide with phosphorothioate linkage
  modified_base 29: mod_base = OTHER; note = 2'-O-methyl modified nucleotide
  modified_base 30: mod_base = OTHER; note = 2'-O-methyl modified nucleotide
  modified_base 31: mod_base = OTHER; note = 2'-O-methyl modified nucleotide
  modified_base 32: mod_base = OTHER; note = 2'-O-methyl modified nucleotide
  modified_base 33: mod_base = OTHER; note = 2'-O-methyl modified nucleotide
  modified_base 34: mod_base = OTHER; note = 2'-O-methyl modified nucleotide
  modified_base 35: mod_base = OTHER; note = 2'-O-methyl modified nucleotide
  modified_base 36: mod_base = OTHER; note = 2'-O-methyl modified nucleotide
  modified_base 37: mod_base = OTHER; note = 2'-O-methyl modified nucleotide
  modified_base 38: mod_base = OTHER; note = 2'-O-methyl modified nucleotide
  modified_base 39: mod_base = OTHER; note = 2'-O-methyl modified nucleotide
  modified_base 40: mod_base = OTHER; note = 2'-O-methyl modified nucleotide
  modified_base 69: mod_base = OTHER; note = 2'-O-methyl modified nucleotide
  modified_base 70: mod_base = OTHER; note = 2'-O-methyl modified nucleotide
  modified_base 71: mod_base = OTHER; note = 2'-O-methyl modified nucleotide
  modified_base 72: mod_base = OTHER; note = 2'-O-methyl modified nucleotide
  modified_base 73: mod_base = OTHER; note = 2'-O-methyl modified nucleotide
  modified_base 74: mod_base = OTHER; note = 2'-O-methyl modified nucleotide
  modified_base 75: mod_base = OTHER; note = 2'-O-methyl modified nucleotide
  modified_base 76: mod_base = OTHER; note = 2'-O-methyl modified nucleotide
  modified_base 77: mod_base = OTHER; note = 2'-O-methyl modified nucleotide
  modified_base 78: mod_base = OTHER; note = 2'-O-methyl modified nucleotide
  modified_base 79: mod_base = OTHER; note = 2'-O-methyl modified nucleotide
  modified_base 80: mod_base = OTHER; note = 2'-O-methyl modified nucleotide
  modified_base 81: mod_base = OTHER; note = 2'-O-methyl modified nucleotide
  modified_base 82: mod_base = OTHER; note = 2'-O-methyl modified nucleotide
  modified_base 83: mod_base = OTHER; note = 2'-O-methyl modified nucleotide
  modified_base 84: mod_base = OTHER; note = 2'-O-methyl modified nucleotide
  modified_base 85: mod_base = OTHER; note = 2'-O-methyl modified nucleotide
  modified_base 86: mod_base = OTHER; note = 2'-O-methyl modified nucleotide
  modified_base 87: mod_base = OTHER; note = 2'-O-methyl modified nucleotide
  modified_base 88: mod_base = OTHER; note = 2'-O-methyl modified nucleotide
  modified_base 89: mod_base = OTHER; note = 2'-O-methyl modified nucleotide
  modified_base 90: mod_base = OTHER; note = 2'-O-methyl modified nucleotide
  modified_base 91: mod_base = OTHER; note = 2'-O-methyl modified nucleotide
  modified_base 92: mod_base = OTHER; note = 2'-O-methyl modified nucleotide
  modified_base 93: mod_base = OTHER; note = 2'-O-methyl modified nucleotide
  modified_base 94: mod_base = OTHER; note = 2'-O-methyl modified nucleotide
  modified_base 95: mod_base = OTHER; note = 2'-O-methyl modified nucleotide
  modified_base 96: mod_base = OTHER; note = 2'-O-methyl modified nucleotide
  modified_base 118: mod_base = OTHER; note = Nucleotide with phosphorothioate linkage
  modified_base 119: mod_base = OTHER; note = 2'-O-methyl modified nucleotide with phosphorothioate linkage
  modified_base 120: mod_base = OTHER; note = 2'-O-methyl modified nucleotide with phosphorothioate linkage
  modified_base 121: mod_base = OTHER; note = 2'-O-methyl modified nucleotide
gagtagcgcgagcacagctagttttagagctagaaatagcaagttaaaataaggctagtccgttatcaacttgaaaaagtggcaccgagtcggtgccgtggccttagtgatgctgtgctcg

SEQ ID NO: 17792 - RNA, 120 nt, synthetic construct
  source 1..120: mol_type = other RNA
  modified_base 1: mod_base = OTHER; note = 2'-O-methyl modified nucleotide with phosphorothioate linkage
  modified_base 2: mod_base = OTHER; note = 2'-O-methyl modified nucleotide with phosphorothioate linkage
  modified_base 3: mod_base = OTHER; note = 2'-O-methyl modified nucleotide with phosphorothioate linkage
  modified_base 29: mod_base = OTHER; note = 2'-O-methyl modified nucleotide
  modified_base 30: mod_base = OTHER; note = 2'-O-methyl modified nucleotide
  modified_base 31: mod_base = OTHER; note = 2'-O-methyl modified nucleotide
  modified_base 32: mod_base = OTHER; note = 2'-O-methyl modified nucleotide
  modified_base 33: mod_base = OTHER; note = 2'-O-methyl modified nucleotide
  modified_base 34: mod_base = OTHER; note = 2'-O-methyl modified nucleotide
  modified_base 35: mod_base = OTHER; note = 2'-O-methyl modified nucleotide
  modified_base 36: mod_base = OTHER; note = 2'-O-methyl modified nucleotide
  modified_base 37: mod_base = OTHER; note = 2'-O-methyl modified nucleotide
  modified_base 38: mod_base = OTHER; note = 2'-O-methyl modified nucleotide
  modified_base 39: mod_base = OTHER; note = 2'-O-methyl modified nucleotide
  modified_base 40: mod_base = OTHER; note = 2'-O-methyl modified nucleotide
  modified_base 69: mod_base = OTHER; note = 2'-O-methyl modified nucleotide
  modified_base 70: mod_base = OTHER; note = 2'-O-methyl modified nucleotide
  modified_base 71: mod_base = OTHER; note = 2'-O-methyl modified nucleotide
  modified_base 72: mod_base = OTHER; note = 2'-O-methyl modified nucleotide
  modified_base 73: mod_base = OTHER; note = 2'-O-methyl modified nucleotide
  modified_base 74: mod_base = OTHER; note = 2'-O-methyl modified nucleotide
  modified_base 75: mod_base = OTHER; note = 2'-O-methyl modified nucleotide
  modified_base 76: mod_base = OTHER; note = 2'-O-methyl modified nucleotide
  modified_base 77: mod_base = OTHER; note = 2'-O-methyl modified nucleotide
  modified_base 78: mod_base = OTHER; note = 2'-O-methyl modified nucleotide
  modified_base 79: mod_base = OTHER; note = 2'-O-methyl modified nucleotide
  modified_base 80: mod_base = OTHER; note = 2'-O-methyl modified nucleotide
  modified_base 81: mod_base = OTHER; note = 2'-O-methyl modified nucleotide
  modified_base 82: mod_base = OTHER; note = 2'-O-methyl modified nucleotide
  modified_base 83: mod_base = OTHER; note = 2'-O-methyl modified nucleotide
  modified_base 84: mod_base = OTHER; note = 2'-O-methyl modified nucleotide
  modified_base 85: mod_base = OTHER; note = 2'-O-methyl modified nucleotide
  modified_base 86: mod_base = OTHER; note = 2'-O-methyl modified nucleotide
  modified_base 87: mod_base = OTHER; note = 2'-O-methyl modified nucleotide
  modified_base 88: mod_base = OTHER; note = 2'-O-methyl modified nucleotide
  modified_base 89: mod_base = OTHER; note = 2'-O-methyl modified nucleotide
  modified_base 90: mod_base = OTHER; note = 2'-O-methyl modified nucleotide
  modified_base 91: mod_base = OTHER; note = 2'-O-methyl modified nucleotide
  modified_base 92: mod_base = OTHER; note = 2'-O-methyl modified nucleotide
  modified_base 93: mod_base = OTHER; note = 2'-O-methyl modified nucleotide
  modified_base 94: mod_base = OTHER; note = 2'-O-methyl modified nucleotide
  modified_base 95: mod_base = OTHER; note = 2'-O-methyl modified nucleotide
  modified_base 96: mod_base = OTHER; note = 2'-O-methyl modified nucleotide
  modified_base 117: mod_base = OTHER; note = Nucleotide with phosphorothioate linkage
  modified_base 118: mod_base = OTHER; note = 2'-O-methyl modified nucleotide with phosphorothioate linkage
  modified_base 119: mod_base = OTHER; note = 2'-O-methyl modified nucleotide with phosphorothioate linkage
  modified_base 120: mod_base = OTHER; note = 2'-O-methyl modified nucleotide
gagtagcgcgagcacagctagttttagagctagaaatagcaagttaaaataaggctagtccgttatcaacttgaaaaagtggcaccgagtcggtgccgtggccttagtgatgctgtgctc

SEQ ID NO: 17793 - RNA, 127 nt, synthetic construct
  source 1..127: mol_type = other RNA
  modified_base 1: mod_base = OTHER; note = 2'-O-methyl modified nucleotide with phosphorothioate linkage
  modified_base 2: mod_base = OTHER; note = 2'-O-methyl modified nucleotide with phosphorothioate linkage
  modified_base 3: mod_base = OTHER; note = 2'-O-methyl modified nucleotide with phosphorothioate linkage
  modified_base 29: mod_base = OTHER; note = 2'-O-methyl modified nucleotide
  modified_base 30: mod_base = OTHER; note = 2'-O-methyl modified nucleotide
  modified_base 31: mod_base = OTHER; note = 2'-O-methyl modified nucleotide
  modified_base 32: mod_base = OTHER; note = 2'-O-methyl modified nucleotide
  modified_base 33: mod_base = OTHER; note = 2'-O-methyl modified nucleotide
  modified_base 34: mod_base = OTHER; note = 2'-O-methyl modified nucleotide
  modified_base 35: mod_base = OTHER; note = 2'-O-methyl modified nucleotide
  modified_base 36: mod_base = OTHER; note = 2'-O-methyl modified nucleotide
  modified_base 37: mod_base = OTHER; note = 2'-O-methyl modified nucleotide
  modified_base 38: mod_base = OTHER; note = 2'-O-methyl modified nucleotide
  modified_base 39: mod_base = OTHER; note = 2'-O-methyl modified nucleotide
  modified_base 40: mod_base = OTHER; note = 2'-O-methyl modified nucleotide
  modified_base 69: mod_base = OTHER; note = 2'-O-methyl modified nucleotide
  modified_base 70: mod_base = OTHER; note = 2'-O-methyl modified nucleotide
  modified_base 71: mod_base = OTHER; note = 2'-O-methyl modified nucleotide
  modified_base 72: mod_base = OTHER; note = 2'-O-methyl modified nucleotide
  modified_base 73: mod_base = OTHER; note = 2'-O-methyl modified nucleotide
  modified_base 74: mod_base = OTHER; note = 2'-O-methyl modified nucleotide
  modified_base 75: mod_base = OTHER; note = 2'-O-methyl modified nucleotide
  modified_base 76: mod_base = OTHER; note = 2'-O-methyl modified nucleotide
  modified_base 77: mod_base = OTHER; note = 2'-O-methyl modified nucleotide
  modified_base 78: mod_base = OTHER; note = 2'-O-methyl modified nucleotide
  modified_base 79: mod_base = OTHER; note = 2'-O-methyl modified nucleotide
  modified_base 80: mod_base = OTHER; note = 2'-O-methyl modified nucleotide
  modified_base 81: mod_base = OTHER; note = 2'-O-methyl modified nucleotide
  modified_base 82: mod_base = OTHER; note = 2'-O-methyl modified nucleotide
  modified_base 83: mod_base = OTHER; note = 2'-O-methyl modified nucleotide
  modified_base 84: mod_base = OTHER; note = 2'-O-methyl modified nucleotide
  modified_base 85: mod_base = OTHER; note = 2'-O-methyl modified nucleotide
  modified_base 86: mod_base = OTHER; note = 2'-O-methyl modified nucleotide
  modified_base 87: mod_base = OTHER; note = 2'-O-methyl modified nucleotide
  modified_base 88: mod_base = OTHER; note = 2'-O-methyl modified nucleotide
  modified_base 89: mod_base = OTHER; note = 2'-O-methyl modified nucleotide
  modified_base 90: mod_base = OTHER; note = 2'-O-methyl modified nucleotide
  modified_base 91: mod_base = OTHER; note = 2'-O-methyl modified nucleotide
  modified_base 92: mod_base = OTHER; note = 2'-O-methyl modified nucleotide
  modified_base 93: mod_base = OTHER; note = 2'-O-methyl modified nucleotide
  modified_base 94: mod_base = OTHER; note = 2'-O-methyl modified nucleotide
  modified_base 95: mod_base = OTHER; note = 2'-O-methyl modified nucleotide
  modified_base 96: mod_base = OTHER; note = 2'-O-methyl modified nucleotide
  modified_base 124: mod_base = OTHER; note = Nucleotide with phosphorothioate linkage
  modified_base 125: mod_base = OTHER; note = 2'-O-methyl modified nucleotide with phosphorothioate linkage
  modified_base 126: mod_base = OTHER; note = 2'-O-methyl modified nucleotide with phosphorothioate linkage
  modified_base 127: mod_base = OTHER; note = 2'-O-methyl modified nucleotide
gagtagcgcgagcacagctagttttagagctagaaatagcaagttaaaataaggctagtccgttatcaacttgaaaaagtggcaccgagtcggtgctccgtggccttagtgatgctgtgctcgcgct

SEQ ID NO: 17794 - RNA, 126 nt, synthetic construct
  source 1..126: mol_type = other RNA
  modified_base 1: mod_base = OTHER; note = 2'-O-methyl modified nucleotide with phosphorothioate linkage
  modified_base 2: mod_base = OTHER; note = 2'-O-methyl modified nucleotide with phosphorothioate linkage
  modified_base 3: mod_base = OTHER; note = 2'-O-methyl modified nucleotide with phosphorothioate linkage
  modified_base 29: mod_base = OTHER; note = 2'-O-methyl modified nucleotide
  modified_base 30: mod_base = OTHER; note = 2'-O-methyl modified nucleotide
  modified_base 31: mod_base = OTHER; note = 2'-O-methyl modified nucleotide
  modified_base 32: mod_base = OTHER; note = 2'-O-methyl modified nucleotide
  modified_base 33: mod_base = OTHER; note = 2'-O-methyl modified nucleotide
  modified_base 34: mod_base = OTHER; note = 2'-O-methyl modified nucleotide
  modified_base 35: mod_base = OTHER; note = 2'-O-methyl modified nucleotide
  modified_base 36: mod_base = OTHER; note = 2'-O-methyl modified nucleotide
  modified_base 37: mod_base = OTHER; note = 2'-O-methyl modified nucleotide
  modified_base 38: mod_base = OTHER; note = 2'-O-methyl modified nucleotide
  modified_base 39: mod_base = OTHER; note = 2'-O-methyl modified nucleotide
  modified_base 40: mod_base = OTHER; note = 2'-O-methyl modified nucleotide
  modified_base 69: mod_base = OTHER; note = 2'-O-methyl modified nucleotide
  modified_base 70: mod_base = OTHER; note = 2'-O-methyl modified nucleotide
  modified_base 71: mod_base = OTHER; note = 2'-O-methyl modified nucleotide
  modified_base 72: mod_base = OTHER; note = 2'-O-methyl modified nucleotide
  modified_base 73: mod_base = OTHER; note = 2'-O-methyl modified nucleotide
  modified_base 74: mod_base = OTHER; note = 2'-O-methyl modified nucleotide
  modified_base 75: mod_base = OTHER; note = 2'-O-methyl modified nucleotide
  modified_base 76: mod_base = OTHER; note = 2'-O-methyl modified nucleotide
  modified_base 77: mod_base = OTHER; note = 2'-O-methyl modified nucleotide
  modified_base 78: mod_base = OTHER; note = 2'-O-methyl modified nucleotide
  modified_base 79: mod_base = OTHER; note = 2'-O-methyl modified nucleotide
  modified_base 80: mod_base = OTHER; note = 2'-O-methyl modified nucleotide
  modified_base 81: mod_base = OTHER; note = 2'-O-methyl modified nucleotide
  modified_base 82: mod_base = OTHER; note = 2'-O-methyl modified nucleotide
  modified_base 83: mod_base = OTHER; note = 2'-O-methyl modified nucleotide
  modified_base 84: mod_base = OTHER; note = 2'-O-methyl modified nucleotide
  modified_base 85: mod_base = OTHER; note = 2'-O-methyl modified nucleotide
  modified_base 86: mod_base = OTHER; note = 2'-O-methyl modified nucleotide
  modified_base 87: mod_base = OTHER; note = 2'-O-methyl modified nucleotide
  modified_base 88: mod_base = OTHER; note = 2'-O-methyl modified nucleotide
  modified_base 89: mod_base = OTHER; note = 2'-O-methyl modified nucleotide
  modified_base 90: mod_base = OTHER; note = 2'-O-methyl modified nucleotide
  modified_base 91: mod_base = OTHER; note = 2'-O-methyl modified nucleotide
  modified_base 92: mod_base = OTHER; note = 2'-O-methyl modified nucleotide
  modified_base 93: mod_base = OTHER; note = 2'-O-methyl modified nucleotide
  modified_base 94: mod_base = OTHER; note = 2'-O-methyl modified nucleotide
  modified_base 95: mod_base = OTHER; note = 2'-O-methyl modified nucleotide
  modified_base 96: mod_base = OTHER; note = 2'-O-methyl modified nucleotide
  modified_base 123: mod_base = OTHER; note = Nucleotide with phosphorothioate linkage
  modified_base 124: mod_base = OTHER; note = 2'-O-methyl modified nucleotide with phosphorothioate linkage
  modified_base 125: mod_base = OTHER; note = 2'-O-methyl modified nucleotide with phosphorothioate linkage
  modified_base 126: mod_base = OTHER; note = 2'-O-methyl modified nucleotide
gagtagcgcgagcacagctagttttagagctagaaatagcaagttaaaataaggctagtccgttatcaacttgaaaaagtggcaccgagtcggtgctccgtggccttagtgatgctgtgctcgcgc

SEQ ID NO: 17795 - RNA, 125 nt, synthetic construct
  source 1..125: mol_type = other RNA
  modified_base 1: mod_base = OTHER; note = 2'-O-methyl modified nucleotide with phosphorothioate linkage
  modified_base 2: mod_base = OTHER; note = 2'-O-methyl modified nucleotide with phosphorothioate linkage
  modified_base 3: mod_base = OTHER; note = 2'-O-methyl modified nucleotide with phosphorothioate linkage
  modified_base 29: mod_base = OTHER; note = 2'-O-methyl modified nucleotide
  modified_base 30: mod_base = OTHER; note = 2'-O-methyl modified nucleotide
  modified_base 31: mod_base = OTHER; note = 2'-O-methyl modified nucleotide
  modified_base 32: mod_base = OTHER; note = 2'-O-methyl modified nucleotide
  modified_base 33: mod_base = OTHER; note = 2'-O-methyl modified nucleotide
  modified_base 34: mod_base = OTHER; note = 2'-O-methyl modified nucleotide
  modified_base 35: mod_base = OTHER; note = 2'-O-methyl modified nucleotide
  modified_base 36: mod_base = OTHER; note = 2'-O-methyl modified nucleotide
  modified_base 37: mod_base = OTHER; note = 2'-O-methyl modified nucleotide
  modified_base 38: mod_base = OTHER; note = 2'-O-methyl modified nucleotide
  modified_base 39: mod_base = OTHER; note = 2'-O-methyl modified nucleotide
  modified_base 40: mod_base = OTHER; note = 2'-O-methyl modified nucleotide
  modified_base 69: mod_base = OTHER; note = 2'-O-methyl modified nucleotide
  modified_base 70: mod_base = OTHER; note = 2'-O-methyl modified nucleotide
  modified_base 71: mod_base = OTHER; note = 2'-O-methyl modified nucleotide
  modified_base 72: mod_base = OTHER; note = 2'-O-methyl modified nucleotide
  modified_base 73: mod_base = OTHER; note = 2'-O-methyl modified nucleotide
  modified_base 74: mod_base = OTHER; note = 2'-O-methyl modified nucleotide
  modified_base 75: mod_base = OTHER; note = 2'-O-methyl modified nucleotide
  modified_base 76: mod_base = OTHER; note = 2'-O-methyl modified nucleotide
  modified_base 77: mod_base = OTHER; note = 2'-O-methyl modified nucleotide
  modified_base 78: mod_base = OTHER; note = 2'-O-methyl modified nucleotide
  modified_base 79: mod_base = OTHER; note = 2'-O-methyl modified nucleotide
  modified_base 80: mod_base = OTHER; note = 2'-O-methyl modified nucleotide
  modified_base 81: mod_base = OTHER; note = 2'-O-methyl modified nucleotide
  modified_base 82: mod_base = OTHER; note = 2'-O-methyl modified nucleotide
  modified_base 83: mod_base = OTHER; note = 2'-O-methyl modified nucleotide
  modified_base 84: mod_base = OTHER; note = 2'-O-methyl modified nucleotide
  modified_base 85: mod_base = OTHER; note = 2'-O-methyl modified nucleotide
  modified_base 86: mod_base = OTHER; note = 2'-O-methyl modified nucleotide
  modified_base 87: mod_base = OTHER; note = 2'-O-methyl modified nucleotide
  modified_base 88: mod_base = OTHER; note = 2'-O-methyl modified nucleotide
  modified_base 89: mod_base = OTHER; note = 2'-O-methyl modified nucleotide
  modified_base 90: mod_base = OTHER; note = 2'-O-methyl modified nucleotide
  modified_base 91: mod_base = OTHER; note = 2'-O-methyl modified nucleotide
  modified_base 92: mod_base = OTHER; note = 2'-O-methyl modified nucleotide
  modified_base 93: mod_base = OTHER; note = 2'-O-methyl modified nucleotide
  modified_base 94: mod_base = OTHER; note = 2'-O-methyl modified nucleotide
  modified_base 95: mod_base = OTHER; note = 2'-O-methyl modified nucleotide
  modified_base 96: mod_base = OTHER; note = 2'-O-methyl modified nucleotide
  modified_base 122: mod_base = OTHER; note = Nucleotide with phosphorothioate linkage
  modified_base 123: mod_base = OTHER; note = 2'-O-methyl modified nucleotide with phosphorothioate linkage
  modified_base 124: mod_base = OTHER; note = 2'-O-methyl modified nucleotide with phosphorothioate linkage
  modified_base 125: mod_base = OTHER; note = 2'-O-methyl modified nucleotide
gagtagcgcgagcacagctagttttagagctagaaatagcaagttaaaataaggctagtccgttatcaacttgaaaaagtggcaccgagtcggtgctccgtggccttagtgatgctgtgctcgcg

SEQ ID NO: 17796 - RNA, 124 nt, synthetic construct
  source 1..124: mol_type = other RNA
  modified_base 1: mod_base = OTHER; note = 2'-O-methyl modified nucleotide with phosphorothioate linkage
  modified_base 2: mod_base = OTHER; note = 2'-O-methyl modified nucleotide with phosphorothioate linkage
  modified_base 3: mod_base = OTHER; note = 2'-O-methyl modified nucleotide with phosphorothioate linkage
  modified_base 29: mod_base = OTHER; note = 2'-O-methyl modified nucleotide
  modified_base 30: mod_base = OTHER; note = 2'-O-methyl modified nucleotide
  modified_base 31: mod_base = OTHER; note = 2'-O-methyl modified nucleotide
  modified_base 32: mod_base = OTHER; note = 2'-O-methyl modified nucleotide
  modified_base 33: mod_base = OTHER; note = 2'-O-methyl modified nucleotide
  modified_base 34: mod_base = OTHER; note = 2'-O-methyl modified nucleotide
  modified_base 35: mod_base = OTHER; note = 2'-O-methyl modified nucleotide
  modified_base 36: mod_base = OTHER; note = 2'-O-methyl modified nucleotide
  modified_base 37: mod_base = OTHER; note = 2'-O-methyl modified nucleotide
  modified_base 38: mod_base = OTHER; note = 2'-O-methyl modified nucleotide
  modified_base 39: mod_base = OTHER; note = 2'-O-methyl modified nucleotide
  modified_base 40: mod_base = OTHER; note = 2'-O-methyl modified nucleotide
  modified_base 69: mod_base = OTHER; note = 2'-O-methyl modified nucleotide
  modified_base 70: mod_base = OTHER; note = 2'-O-methyl modified nucleotide
  modified_base 71: mod_base = OTHER; note = 2'-O-methyl modified nucleotide
  modified_base 72: mod_base = OTHER; note = 2'-O-methyl modified nucleotide
  modified_base 73: mod_base = OTHER; note = 2'-O-methyl modified nucleotide
  modified_base 74: mod_base = OTHER; note = 2'-O-methyl modified nucleotide
  modified_base 75: mod_base = OTHER; note = 2'-O-methyl modified nucleotide
  modified_base 76: mod_base = OTHER; note = 2'-O-methyl modified nucleotide
  modified_base 77: mod_base = OTHER; note = 2'-O-methyl modified nucleotide
  modified_base 78: mod_base = OTHER; note = 2'-O-methyl modified nucleotide
  modified_base 79: mod_base = OTHER; note = 2'-O-methyl modified nucleotide
  modified_base 80: mod_base = OTHER; note = 2'-O-methyl modified nucleotide
  modified_base 81: mod_base = OTHER; note = 2'-O-methyl modified nucleotide
  modified_base 82: mod_base = OTHER; note = 2'-O-methyl modified nucleotide
  modified_base 83: mod_base = OTHER; note = 2'-O-methyl modified nucleotide
  modified_base 84: mod_base = OTHER; note = 2'-O-methyl modified nucleotide
  modified_base 85: mod_base = OTHER; note = 2'-O-methyl modified nucleotide
  modified_base 86: mod_base = OTHER; note = 2'-O-methyl modified nucleotide
  modified_base 87: mod_base = OTHER; note = 2'-O-methyl modified nucleotide
  modified_base 88: mod_base = OTHER; note = 2'-O-methyl modified nucleotide
  modified_base 89: mod_base = OTHER; note = 2'-O-methyl modified nucleotide
  modified_base 90: mod_base = OTHER; note = 2'-O-methyl modified nucleotide
  modified_base 91: mod_base = OTHER; note = 2'-O-methyl modified nucleotide
  modified_base 92: mod_base = OTHER; note = 2'-O-methyl modified nucleotide
  modified_base 93: mod_base = OTHER; note = 2'-O-methyl modified nucleotide
  modified_base 94: mod_base = OTHER; note = 2'-O-methyl modified nucleotide
  modified_base 95: mod_base = OTHER; note = 2'-O-methyl modified nucleotide
  modified_base 96: mod_base = OTHER; note = 2'-O-methyl modified nucleotide
  modified_base 121: mod_base = OTHER; note = Nucleotide with phosphorothioate linkage
  modified_base 122: mod_base = OTHER; note = 2'-O-methyl modified nucleotide with phosphorothioate linkage
  modified_base 123: mod_base = OTHER; note = 2'-O-methyl modified nucleotide with phosphorothioate linkage
  modified_base 124: mod_base = OTHER; note = 2'-O-methyl modified nucleotide
gagtagcgcgagcacagctagttttagagctagaaatagcaagttaaaataaggctagtccgttatcaacttgaaaaagtggcaccgagtcggtgctccgtggccttagtgatgctgtgctcgc

SEQ ID NO: 17797 - RNA, 123 nt, synthetic construct
  source 1..123: mol_type = other RNA
  modified_base 1: mod_base = OTHER; note = 2'-O-methyl modified nucleotide with phosphorothioate linkage
  modified_base 2: mod_base = OTHER; note = 2'-O-methyl modified nucleotide with phosphorothioate linkage
  modified_base 3: mod_base = OTHER; note = 2'-O-methyl modified nucleotide with phosphorothioate linkage
  modified_base 29: mod_base = OTHER; note = 2'-O-methyl modified nucleotide
  modified_base 30: mod_base = OTHER; note = 2'-O-methyl modified nucleotide
  modified_base 31: mod_base = OTHER; note = 2'-O-methyl modified nucleotide
  modified_base 32: mod_base = OTHER; note = 2'-O-methyl modified nucleotide
  modified_base 33: mod_base = OTHER; note = 2'-O-methyl modified nucleotide
  modified_base 34: mod_base = OTHER; note = 2'-O-methyl modified nucleotide
  modified_base 35: mod_base = OTHER; note = 2'-O-methyl modified nucleotide
  modified_base 36: mod_base = OTHER; note = 2'-O-methyl modified nucleotide
  modified_base 37: mod_base = OTHER; note = 2'-O-methyl modified nucleotide
  modified_base 38: mod_base = OTHER; note = 2'-O-methyl modified nucleotide
  modified_base 39: mod_base = OTHER; note = 2'-O-methyl modified nucleotide
  modified_base 40: mod_base = OTHER; note = 2'-O-methyl modified nucleotide
  modified_base 69: mod_base = OTHER; note = 2'-O-methyl modified nucleotide
  modified_base 70: mod_base = OTHER; note = 2'-O-methyl modified nucleotide
  modified_base 71: mod_base = OTHER; note = 2'-O-methyl modified nucleotide
  modified_base 72: mod_base = OTHER; note = 2'-O-methyl modified nucleotide
  modified_base 73: mod_base = OTHER; note = 2'-O-methyl modified nucleotide
  modified_base 74: mod_base = OTHER; note = 2'-O-methyl modified nucleotide
  modified_base 75: mod_base = OTHER; note = 2'-O-methyl modified nucleotide
  modified_base 76: mod_base = OTHER; note = 2'-O-methyl modified nucleotide
  modified_base 77: mod_base = OTHER; note = 2'-O-methyl modified nucleotide
  modified_base 78: mod_base = OTHER; note = 2'-O-methyl modified nucleotide
  modified_base 79: mod_base = OTHER; note = 2'-O-methyl modified nucleotide
  modified_base 80: mod_base = OTHER; note = 2'-O-methyl modified nucleotide
  modified_base 81: mod_base = OTHER; note = 2'-O-methyl modified nucleotide
  modified_base 82: mod_base = OTHER; note = 2'-O-methyl modified nucleotide
  modified_base 83: mod_base = OTHER; note = 2'-O-methyl modified nucleotide
  modified_base 84: mod_base = OTHER; note = 2'-O-methyl modified nucleotide
  modified_base 85: mod_base = OTHER; note = 2'-O-methyl modified nucleotide
  modified_base 86: mod_base = OTHER; note = 2'-O-methyl modified nucleotide
  modified_base 87: mod_base = OTHER; note = 2'-O-methyl modified nucleotide
  modified_base 88: mod_base = OTHER; note = 2'-O-methyl modified nucleotide
  modified_base 89: mod_base = OTHER; note = 2'-O-methyl modified nucleotide
  modified_base 90: mod_base = OTHER; note = 2'-O-methyl modified nucleotide
  modified_base 91: mod_base = OTHER; note = 2'-O-methyl modified nucleotide
  modified_base 92: mod_base = OTHER; note = 2'-O-methyl modified nucleotide
  modified_base 93: mod_base = OTHER; note = 2'-O-methyl modified nucleotide
  modified_base 94: mod_base = OTHER; note = 2'-O-methyl modified nucleotide
  modified_base 95: mod_base = OTHER; note = 2'-O-methyl modified nucleotide
  modified_base 96: mod_base = OTHER; note = 2'-O-methyl modified nucleotide
  modified_base 120: mod_base = OTHER; note = Nucleotide with phosphorothioate linkage
  modified_base 121: mod_base = OTHER; note = 2'-O-methyl modified nucleotide with phosphorothioate linkage
  modified_base 122: mod_base = OTHER; note = 2'-O-methyl modified nucleotide with phosphorothioate linkage
  modified_base 123: mod_base = OTHER; note = 2'-O-methyl modified nucleotide
gagtagcgcgagcacagctagttttagagctagaaatagcaagttaaaataaggctagtccgttatcaacttgaaaaagtggcaccgagtcggtgctccgtggccttagtgatgctgtgctcg

SEQ ID NO: 17798 - RNA, 122 nt, synthetic construct
  source 1..122: mol_type = other RNA
  modified_base 1: mod_base = OTHER; note = 2'-O-methyl modified nucleotide with phosphorothioate linkage
  modified_base 2: mod_base = OTHER; note = 2'-O-methyl modified nucleotide with phosphorothioate linkage
  modified_base 3: mod_base = OTHER; note = 2'-O-methyl modified nucleotide with phosphorothioate linkage
  modified_base 29: mod_base = OTHER; note = 2'-O-methyl modified nucleotide
  modified_base 30: mod_base = OTHER; note = 2'-O-methyl modified nucleotide
  modified_base 31: mod_base = OTHER; note = 2'-O-methyl modified nucleotide
  modified_base 32: mod_base = OTHER; note = 2'-O-methyl modified nucleotide
  modified_base 33: mod_base = OTHER; note = 2'-O-methyl modified nucleotide
  modified_base 34: mod_base = OTHER; note = 2'-O-methyl modified nucleotide
  modified_base 35: mod_base = OTHER; note = 2'-O-methyl modified nucleotide
  modified_base 36: mod_base = OTHER; note = 2'-O-methyl modified nucleotide
  modified_base 37: mod_base = OTHER; note = 2'-O-methyl modified nucleotide
  modified_base 38: mod_base = OTHER; note = 2'-O-methyl modified nucleotide
  modified_base 39: mod_base = OTHER; note = 2'-O-methyl modified nucleotide
  modified_base 40: mod_base = OTHER; note = 2'-O-methyl modified nucleotide
  modified_base 69: mod_base = OTHER; note = 2'-O-methyl modified nucleotide
  modified_base 70: mod_base = OTHER; note = 2'-O-methyl modified nucleotide
  modified_base 71: mod_base = OTHER; note = 2'-O-methyl modified nucleotide
  modified_base 72: mod_base = OTHER; note = 2'-O-methyl modified nucleotide
  modified_base 73: mod_base = OTHER; note = 2'-O-methyl modified nucleotide
  modified_base 74: mod_base = OTHER; note = 2'-O-methyl modified nucleotide
  modified_base 75: mod_base = OTHER; note = 2'-O-methyl modified nucleotide
  modified_base 76: mod_base = OTHER; note = 2'-O-methyl modified nucleotide
  modified_base 77: mod_base = OTHER; note = 2'-O-methyl modified nucleotide
  modified_base 78: mod_base = OTHER; note = 2'-O-methyl modified nucleotide
  modified_base 79: mod_base = OTHER; note = 2'-O-methyl modified nucleotide
  modified_base 80: mod_base = OTHER; note = 2'-O-methyl modified nucleotide
  modified_base 81: mod_base = OTHER; note = 2'-O-methyl modified nucleotide
  modified_base 82: mod_base = OTHER; note = 2'-O-methyl modified nucleotide
  modified_base 83: mod_base = OTHER; note = 2'-O-methyl modified nucleotide
  modified_base 84: mod_base = OTHER; note = 2'-O-methyl modified nucleotide
  modified_base 85: mod_base = OTHER; note = 2'-O-methyl modified nucleotide
  modified_base 86: mod_base = OTHER; note = 2'-O-methyl modified nucleotide
  modified_base 87: mod_base = OTHER; note = 2'-O-methyl modified nucleotide
  modified_base 88: mod_base = OTHER; note = 2'-O-methyl modified nucleotide
  modified_base 89: mod_base = OTHER; note = 2'-O-methyl modified nucleotide
  modified_base 90: mod_base = OTHER; note = 2'-O-methyl modified nucleotide
  modified_base 91: mod_base = OTHER; note = 2'-O-methyl modified nucleotide
  modified_base 92: mod_base = OTHER; note = 2'-O-methyl modified nucleotide
  modified_base 93: mod_base = OTHER; note = 2'-O-methyl modified nucleotide
  modified_base 94: mod_base = OTHER; note = 2'-O-methyl modified nucleotide
  modified_base 95: mod_base = OTHER; note = 2'-O-methyl modified nucleotide
  modified_base 96: mod_base = OTHER; note = 2'-O-methyl modified nucleotide
  modified_base 119: mod_base = OTHER; note = Nucleotide with phosphorothioate linkage
  modified_base 120: mod_base = OTHER; note = 2'-O-methyl modified nucleotide with phosphorothioate linkage
  modified_base 121: mod_base = OTHER; note = 2'-O-methyl modified nucleotide with phosphorothioate linkage
  modified_base 122: mod_base = OTHER; note = 2'-O-methyl modified nucleotide
gagtagcgcgagcacagctagttttagagctagaaatagcaagttaaaataaggctagtccgttatcaacttgaaaaagtggcaccgagtcggtgctccgtggccttagtgatgctgtgctc

SEQ ID NO: 17799 - RNA, 129 nt, synthetic construct
  source 1..129: mol_type = other RNA
  modified_base 1: mod_base = OTHER; note = 2'-O-methyl modified nucleotide with phosphorothioate linkage
  modified_base 2: mod_base = OTHER; note = 2'-O-methyl modified nucleotide with phosphorothioate linkage
  modified_base 3: mod_base = OTHER; note = 2'-O-methyl modified nucleotide with phosphorothioate linkage
  modified_base 29: mod_base = OTHER; note = 2'-O-methyl modified nucleotide
  modified_base 30: mod_base = OTHER; note = 2'-O-methyl modified nucleotide
  modified_base 31: mod_base = OTHER; note = 2'-O-methyl modified nucleotide
  modified_base 32: mod_base = OTHER; note = 2'-O-methyl modified nucleotide
  modified_base 33: mod_base = OTHER; note = 2'-O-methyl modified nucleotide
  modified_base 34: mod_base = OTHER; note = 2'-O-methyl modified nucleotide
  modified_base 35: mod_base = OTHER; note = 2'-O-methyl modified nucleotide
  modified_base 36: mod_base = OTHER; note = 2'-O-methyl modified nucleotide
  modified_base 37: mod_base = OTHER; note = 2'-O-methyl modified nucleotide
  modified_base 38: mod_base = OTHER; note = 2'-O-methyl modified nucleotide
  modified_base 39: mod_base = OTHER; note = 2'-O-methyl modified nucleotide
  modified_base 40: mod_base = OTHER; note = 2'-O-methyl modified nucleotide
  modified_base 69: mod_base = OTHER; note = 2'-O-methyl modified nucleotide
  modified_base 70: mod_base = OTHER; note = 2'-O-methyl modified nucleotide
  modified_base 71: mod_base = OTHER; note = 2'-O-methyl modified nucleotide
  modified_base 72: mod_base = OTHER; note = 2'-O-methyl modified nucleotide
  modified_base 73: mod_base = OTHER; note = 2'-O-methyl modified nucleotide
  modified_base 74: mod_base = OTHER; note = 2'-O-methyl modified nucleotide
  modified_base 75: mod_base = OTHER; note = 2'-O-methyl modified nucleotide
  modified_base 76: mod_base = OTHER; note = 2'-O-methyl modified nucleotide
  modified_base 77: mod_base = OTHER; note = 2'-O-methyl modified nucleotide
  modified_base 78: mod_base = OTHER; note = 2'-O-methyl modified nucleotide
  modified_base 79: mod_base = OTHER; note = 2'-O-methyl modified nucleotide
  modified_base 80: mod_base = OTHER; note = 2'-O-methyl modified nucleotide
  modified_base 81: mod_base = OTHER; note = 2'-O-methyl modified nucleotide
  modified_base 82: mod_base = OTHER; note = 2'-O-methyl modified nucleotide
  modified_base 83: mod_base = OTHER; note = 2'-O-methyl modified nucleotide
  modified_base 84: mod_base = OTHER; note = 2'-O-methyl modified nucleotide
  modified_base 85: mod_base = OTHER; note = 2'-O-methyl modified nucleotide
  modified_base 86: mod_base = OTHER; note = 2'-O-methyl modified nucleotide
  modified_base 87: mod_base = OTHER; note = 2'-O-methyl modified nucleotide
  modified_base 88: mod_base = OTHER; note = 2'-O-methyl modified nucleotide
  modified_base 89: mod_base = OTHER; note = 2'-O-methyl modified nucleotide
  modified_base 90: mod_base = OTHER; note = 2'-O-methyl modified nucleotide
  modified_base 91: mod_base = OTHER; note = 2'-O-methyl modified nucleotide
  modified_base 92: mod_base = OTHER; note = 2'-O-methyl modified nucleotide
  modified_base 93: mod_base = OTHER; note = 2'-O-methyl modified nucleotide
  modified_base 94: mod_base = OTHER; note = 2'-O-methyl modified nucleotide
  modified_base 95: mod_base = OTHER; note = 2'-O-methyl modified nucleotide
  modified_base 96: mod_base = OTHER; note = 2'-O-methyl modified nucleotide
  modified_base 126: mod_base = OTHER; note = Nucleotide with phosphorothioate linkage
  modified_base 127: mod_base = OTHER; note = 2'-O-methyl modified nucleotide with phosphorothioate linkage
  modified_base 128: mod_base = OTHER; note = 2'-O-methyl modified nucleotide with phosphorothioate linkage
  modified_base 129: mod_base = OTHER; note = 2'-O-methyl modified nucleotide
gagtagcgcgagcacagctagttttagagctagaaatagcaagttaaaataaggctagtccgttatcaacttgaaaaagtggcaccgagtcggtgcgctccgtggccttagtgatgctgtgctcgcgct

SEQ ID NO: 17800 - RNA, 128 nt, synthetic construct
  source 1..128: mol_type = other RNA
  modified_base 1: mod_base = OTHER; note = 2'-O-methyl modified nucleotide with phosphorothioate linkage
  modified_base 2: mod_base = OTHER; note = 2'-O-methyl modified nucleotide with phosphorothioate linkage
  modified_base 3: mod_base = OTHER; note = 2'-O-methyl modified nucleotide with phosphorothioate linkage
  modified_base 29: mod_base = OTHER; note = 2'-O-methyl modified nucleotide
  modified_base 30: mod_base = OTHER; note = 2'-O-methyl modified nucleotide
  modified_base 31: mod_base = OTHER; note = 2'-O-methyl modified nucleotide
  modified_base 32: mod_base = OTHER; note = 2'-O-methyl modified nucleotide
  modified_base 33: mod_base = OTHER; note = 2'-O-methyl modified nucleotide
  modified_base 34: mod_base = OTHER; note = 2'-O-methyl modified nucleotide
  modified_base 35: mod_base = OTHER; note = 2'-O-methyl modified nucleotide
  modified_base 36: mod_base = OTHER; note = 2'-O-methyl modified nucleotide
  modified_base 37: mod_base = OTHER; note = 2'-O-methyl modified nucleotide
  modified_base 38: mod_base = OTHER; note = 2'-O-methyl modified nucleotide
  modified_base 39: mod_base = OTHER; note = 2'-O-methyl modified nucleotide
  modified_base 40: mod_base = OTHER; note = 2'-O-methyl modified nucleotide
  modified_base 69: mod_base = OTHER; note = 2'-O-methyl modified nucleotide
  modified_base 70: mod_base = OTHER; note = 2'-O-methyl modified nucleotide
  modified_base 71: mod_base = OTHER; note = 2'-O-methyl modified nucleotide
  modified_base 72: mod_base = OTHER; note = 2'-O-methyl modified nucleotide
  modified_base 73: mod_base = OTHER; note = 2'-O-methyl modified nucleotide
  modified_base 74: mod_base = OTHER; note = 2'-O-methyl modified nucleotide
  modified_base 75: mod_base = OTHER; note = 2'-O-methyl modified nucleotide
  modified_base 76: mod_base = OTHER; note = 2'-O-methyl modified nucleotide
  modified_base 77: mod_base = OTHER; note = 2'-O-methyl modified nucleotide
  modified_base 78: mod_base = OTHER; note = 2'-O-methyl modified nucleotide
  modified_base 79: mod_base = OTHER; note = 2'-O-methyl modified nucleotide
  modified_base 80: mod_base = OTHER; note = 2'-O-methyl modified nucleotide
  modified_base 81: mod_base = OTHER; note = 2'-O-methyl modified nucleotide
  modified_base 82: mod_base = OTHER; note = 2'-O-methyl modified nucleotide
  modified_base 83: mod_base = OTHER; note = 2'-O-methyl modified nucleotide
  modified_base 84: mod_base = OTHER; note = 2'-O-methyl modified nucleotide
  modified_base 85: mod_base = OTHER; note = 2'-O-methyl modified nucleotide
  modified_base 86: mod_base = OTHER; note = 2'-O-methyl modified nucleotide
  modified_base 87: mod_base = OTHER; note = 2'-O-methyl modified nucleotide
  modified_base 88: mod_base = OTHER; note = 2'-O-methyl modified nucleotide
  modified_base 89: mod_base = OTHER; note = 2'-O-methyl modified nucleotide
  modified_base 90: mod_base = OTHER; note = 2'-O-methyl modified nucleotide
  modified_base 91: mod_base = OTHER; note = 2'-O-methyl modified nucleotide
  modified_base 92: mod_base = OTHER; note = 2'-O-methyl modified nucleotide
  modified_base 93: mod_base = OTHER; note = 2'-O-methyl modified nucleotide
  modified_base 94: mod_base = OTHER; note = 2'-O-methyl modified nucleotide
  modified_base 95: mod_base = OTHER; note = 2'-O-methyl modified nucleotide
  modified_base 96: mod_base = OTHER; note = 2'-O-methyl modified nucleotide
  modified_base 125: mod_base = OTHER; note = Nucleotide with phosphorothioate linkage
  modified_base 126: mod_base = OTHER; note = 2'-O-methyl modified nucleotide with phosphorothioate linkage
  modified_base 127: mod_base = OTHER; note = 2'-O-methyl modified nucleotide with phosphorothioate linkage
  modified_base 128: mod_base = OTHER; note = 2'-O-methyl modified nucleotide
gagtagcgcgagcacagctagttttagagctagaaatagcaagttaaaataaggctagtccgttatcaacttgaaaaagtggcaccgagtcggtgcgctccgtggccttagtgatgctgtgctcgcgc

SEQ ID NO: 17801 - RNA, 127 nt, synthetic construct
  source 1..127: mol_type = other RNA
  modified_base 1: mod_base = OTHER; note = 2'-O-methyl modified nucleotide with phosphorothioate linkage
  modified_base 2: mod_base = OTHER; note = 2'-O-methyl modified nucleotide with phosphorothioate linkage
  modified_base 3: mod_base = OTHER; note = 2'-O-methyl modified nucleotide with phosphorothioate linkage
  modified_base 29: mod_base = OTHER; note = 2'-O-methyl modified nucleotide
  modified_base 30: mod_base = OTHER; note = 2'-O-methyl modified nucleotide
  modified_base 31: mod_base = OTHER; note = 2'-O-methyl modified nucleotide
  modified_base 32: mod_base = OTHER; note = 2'-O-methyl modified nucleotide
  modified_base 33: mod_base = OTHER; note = 2'-O-methyl modified nucleotide
  modified_base 34: mod_base = OTHER; note = 2'-O-methyl modified nucleotide
  modified_base 35: mod_base = OTHER; note = 2'-O-methyl modified nucleotide
  modified_base 36: mod_base = OTHER; note = 2'-O-methyl modified nucleotide
  modified_base 37: mod_base = OTHER; note = 2'-O-methyl modified nucleotide
  modified_base 38: mod_base = OTHER; note = 2'-O-methyl modified nucleotide
  modified_base 39: mod_base = OTHER; note = 2'-O-methyl modified nucleotide
  modified_base 40: mod_base = OTHER; note = 2'-O-methyl modified nucleotide
  modified_base 69: mod_base = OTHER; note = 2'-O-methyl modified nucleotide
  modified_base 70: mod_base = OTHER; note = 2'-O-methyl modified nucleotide
  modified_base 71: mod_base = OTHER; note = 2'-O-methyl modified nucleotide
  modified_base 72: mod_base = OTHER; note = 2'-O-methyl modified nucleotide
  modified_base 73: mod_base = OTHER; note = 2'-O-methyl modified nucleotide
  modified_base 74: mod_base = OTHER; note = 2'-O-methyl modified nucleotide
  modified_base 75: mod_base = OTHER; note = 2'-O-methyl modified nucleotide
  modified_base 76: mod_base = OTHER; note = 2'-O-methyl modified nucleotide
  modified_base 77: mod_base = OTHER; note = 2'-O-methyl modified nucleotide
  modified_base 78: mod_base = OTHER; note = 2'-O-methyl modified nucleotide
  modified_base 79: mod_base = OTHER; note = 2'-O-methyl modified nucleotide
  modified_base 80: mod_base = OTHER; note = 2'-O-methyl modified nucleotide
  modified_base 81: mod_base = OTHER; note = 2'-O-methyl modified nucleotide
  modified_base 82: mod_base = OTHER; note = 2'-O-methyl modified nucleotide
  modified_base 83: mod_base = OTHER; note = 2'-O-methyl modified nucleotide
  modified_base 84: mod_base = OTHER; note = 2'-O-methyl modified nucleotide
  modified_base 85: mod_base = OTHER; note = 2'-O-methyl modified nucleotide
  modified_base 86: mod_base = OTHER; note = 2'-O-methyl modified nucleotide
  modified_base 87: mod_base = OTHER; note = 2'-O-methyl modified nucleotide
  modified_base 88: mod_base = OTHER; note = 2'-O-methyl modified nucleotide
  modified_base 89: mod_base = OTHER; note = 2'-O-methyl modified nucleotide
  modified_base 90: mod_base = OTHER; note = 2'-O-methyl modified nucleotide
  modified_base 91: mod_base = OTHER; note = 2'-O-methyl modified nucleotide
  modified_base 92: mod_base = OTHER; note = 2'-O-methyl modified nucleotide
  modified_base 93: mod_base = OTHER; note = 2'-O-methyl modified nucleotide
  modified_base 94: mod_base = OTHER; note = 2'-O-methyl modified nucleotide
  modified_base 95: mod_base = OTHER; note = 2'-O-methyl modified nucleotide
  modified_base 96: mod_base = OTHER; note = 2'-O-methyl modified nucleotide
  modified_base 124: mod_base = OTHER; note = Nucleotide with phosphorothioate linkage
  modified_base 125: mod_base = OTHER; note = 2'-O-methyl modified nucleotide with phosphorothioate linkage
  modified_base 126: mod_base = OTHER; note = 2'-O-methyl modified nucleotide with phosphorothioate linkage
  modified_base 127: mod_base = OTHER; note = 2'-O-methyl modified nucleotide
gagtagcgcgagcacagctagttttagagctagaaatagcaagttaaaataaggctagtccgttatcaacttgaaaaagtggcaccgagtcggtgcgctccgtggccttagtgatgctgtgctcgcg

SEQ ID NO: 17802 - RNA, 126 nt, synthetic construct
  source 1..126: mol_type = other RNA
  modified_base 1: mod_base = OTHER; note = 2'-O-methyl modified nucleotide with phosphorothioate linkage
  modified_base 2: mod_base = OTHER; note = 2'-O-methyl modified nucleotide with phosphorothioate linkage
  modified_base 3: mod_base = OTHER; note = 2'-O-methyl modified nucleotide with phosphorothioate linkage
  modified_base 29: mod_base = OTHER; note = 2'-O-methyl modified nucleotide
  modified_base 30: mod_base = OTHER; note = 2'-O-methyl modified nucleotide
  modified_base 31: mod_base = OTHER; note = 2'-O-methyl modified nucleotide
  modified_base 32: mod_base = OTHER; note = 2'-O-methyl modified nucleotide
  modified_base 33: mod_base = OTHER; note = 2'-O-methyl modified nucleotide
  modified_base 34: mod_base = OTHER; note = 2'-O-methyl modified nucleotide
  modified_base 35: mod_base = OTHER; note = 2'-O-methyl modified nucleotide
  modified_base 36: mod_base = OTHER; note = 2'-O-methyl modified nucleotide
  modified_base 37: mod_base = OTHER; note = 2'-O-methyl modified nucleotide
  modified_base 38: mod_base = OTHER; note = 2'-O-methyl modified nucleotide
  modified_base 39: mod_base = OTHER; note = 2'-O-methyl modified nucleotide
  modified_base 40: mod_base = OTHER; note = 2'-O-methyl modified nucleotide
  modified_base 69: mod_base = OTHER; note = 2'-O-methyl modified nucleotide
  modified_base 70: mod_base = OTHER; note = 2'-O-methyl modified nucleotide
  modified_base 71: mod_base = OTHER; note = 2'-O-methyl modified nucleotide
  modified_base 72: mod_base = OTHER; note = 2'-O-methyl modified nucleotide
  modified_base 73: mod_base = OTHER; note = 2'-O-methyl modified nucleotide
  modified_base 74: mod_base = OTHER; note = 2'-O-methyl modified nucleotide
  modified_base 75: mod_base = OTHER; note = 2'-O-methyl modified nucleotide
  modified_base 76: mod_base = OTHER; note = 2'-O-methyl modified nucleotide
  modified_base 77: mod_base = OTHER; note = 2'-O-methyl modified nucleotide
  modified_base 78: mod_base = OTHER; note = 2'-O-methyl modified nucleotide
  modified_base 79: mod_base = OTHER; note = 2'-O-methyl modified nucleotide
  modified_base 80: mod_base = OTHER; note = 2'-O-methyl modified nucleotide
  modified_base 81: mod_base = OTHER; note = 2'-O-methyl modified nucleotide
  modified_base 82: mod_base = OTHER; note = 2'-O-methyl modified nucleotide
  modified_base 83: mod_base = OTHER; note = 2'-O-methyl modified nucleotide
  modified_base 84: mod_base = OTHER; note = 2'-O-methyl modified nucleotide
  modified_base 85: mod_base = OTHER; note = 2'-O-methyl modified nucleotide
  modified_base 86: mod_base = OTHER; note = 2'-O-methyl modified nucleotide
  modified_base 87: mod_base = OTHER; note = 2'-O-methyl modified nucleotide
  modified_base 88: mod_base = OTHER; note = 2'-O-methyl modified nucleotide
  modified_base 89: mod_base = OTHER; note = 2'-O-methyl modified nucleotide
  modified_base 90: mod_base = OTHER; note = 2'-O-methyl modified nucleotide
  modified_base 91: mod_base = OTHER; note = 2'-O-methyl modified nucleotide
  modified_base 92: mod_base = OTHER; note = 2'-O-methyl modified nucleotide
  modified_base 93: mod_base = OTHER; note = 2'-O-methyl modified nucleotide
  modified_base 94: mod_base = OTHER; note = 2'-O-methyl modified nucleotide
  modified_base 95: mod_base = OTHER; note = 2'-O-methyl modified nucleotide
  modified_base 96: mod_base = OTHER; note = 2'-O-methyl modified nucleotide
  modified_base 123: mod_base = OTHER; note = Nucleotide with phosphorothioate linkage
  modified_base 124: mod_base = OTHER; note = 2'-O-methyl modified nucleotide with phosphorothioate linkage
  modified_base 125: mod_base = OTHER; note = 2'-O-methyl modified nucleotide with phosphorothioate linkage
  modified_base 126: mod_base = OTHER; note = 2'-O-methyl modified nucleotide
gagtagcgcgagcacagctagttttagagctagaaatagcaagttaaaataaggctagtccgttatcaacttgaaaaagtggcaccgagtcggtgcgctccgtggccttagtgatgctgtgctcgc

SEQ ID NO: 17803 - RNA, 125 nt, synthetic construct
  source 1..125: mol_type = other RNA
  modified_base 1: mod_base = OTHER; note = 2'-O-methyl modified nucleotide with phosphorothioate linkage
  modified_base 2: mod_base = OTHER; note = 2'-O-methyl modified nucleotide with phosphorothioate linkage
  modified_base 3: mod_base = OTHER; note = 2'-O-methyl modified nucleotide with phosphorothioate linkage
  modified_base 29: mod_base = OTHER; note = 2'-O-methyl modified nucleotide
  modified_base 30: mod_base = OTHER; note = 2'-O-methyl modified nucleotide
  modified_base 31: mod_base = OTHER; note = 2'-O-methyl modified nucleotide
  modified_base 32: mod_base = OTHER; note = 2'-O-methyl modified nucleotide
  modified_base 33: mod_base = OTHER; note = 2'-O-methyl modified nucleotide
  modified_base 34: mod_base = OTHER; note = 2'-O-methyl modified nucleotide
  modified_base 35: mod_base = OTHER; note = 2'-O-methyl modified nucleotide
  modified_base 36: mod_base = OTHER; note = 2'-O-methyl modified nucleotide
  modified_base 37: mod_base = OTHER; note = 2'-O-methyl modified nucleotide
  modified_base 38: mod_base = OTHER; note = 2'-O-methyl modified nucleotide
  modified_base 39: mod_base = OTHER; note = 2'-O-methyl modified nucleotide
  modified_base 40: mod_base = OTHER; note = 2'-O-methyl modified nucleotide
  modified_base 69: mod_base = OTHER; note = 2'-O-methyl modified nucleotide
  modified_base 70: mod_base = OTHER; note = 2'-O-methyl modified nucleotide
  modified_base 71: mod_base = OTHER; note = 2'-O-methyl modified nucleotide
  modified_base 72: mod_base = OTHER; note = 2'-O-methyl modified nucleotide
  modified_base 73: mod_base = OTHER; note = 2'-O-methyl modified nucleotide
  modified_base 74: mod_base = OTHER; note = 2'-O-methyl modified nucleotide
  modified_base 75: mod_base = OTHER; note = 2'-O-methyl modified nucleotide
  modified_base 76: mod_base = OTHER; note = 2'-O-methyl modified nucleotide
  modified_base 77: mod_base = OTHER; note = 2'-O-methyl modified nucleotide
  modified_base 78: mod_base = OTHER; note = 2'-O-methyl modified nucleotide
  modified_base 79: mod_base = OTHER; note = 2'-O-methyl modified nucleotide
  modified_base 80: mod_base = OTHER; note = 2'-O-methyl modified nucleotide
  modified_base 81: mod_base = OTHER; note = 2'-O-methyl modified nucleotide
  modified_base 82: mod_base = OTHER; note = 2'-O-methyl modified nucleotide
  modified_base 83: mod_base = OTHER; note = 2'-O-methyl modified nucleotide
  modified_base 84: mod_base = OTHER; note = 2'-O-methyl modified nucleotide
  modified_base 85: mod_base = OTHER; note = 2'-O-methyl modified nucleotide
  modified_base 86: mod_base = OTHER; note = 2'-O-methyl modified nucleotide
  modified_base 87: mod_base = OTHER; note = 2'-O-methyl modified nucleotide
  modified_base 88: mod_base = OTHER; note = 2'-O-methyl modified nucleotide
  modified_base 89: mod_base = OTHER; note = 2'-O-methyl modified nucleotide
  modified_base 90: mod_base = OTHER; note = 2'-O-methyl modified nucleotide
  modified_base 91: mod_base = OTHER; note = 2'-O-methyl modified nucleotide
  modified_base 92: mod_base = OTHER; note = 2'-O-methyl modified nucleotide
  modified_base 93: mod_base = OTHER; note = 2'-O-methyl modified nucleotide
  modified_base 94: mod_base = OTHER; note = 2'-O-methyl modified nucleotide
  modified_base 95: mod_base = OTHER; note = 2'-O-methyl modified nucleotide
  modified_base 96: mod_base = OTHER; note = 2'-O-methyl modified nucleotide
  modified_base 122: mod_base = OTHER; note = Nucleotide with phosphorothioate linkage
  modified_base 123: mod_base = OTHER; note = 2'-O-methyl modified nucleotide with phosphorothioate linkage
  modified_base 124: mod_base = OTHER; note = 2'-O-methyl modified nucleotide with phosphorothioate linkage
  modified_base 125: mod_base = OTHER; note = 2'-O-methyl modified nucleotide
gagtagcgcgagcacagctagttttagagctagaaatagcaagttaaaataaggctagtccgttatcaacttgaaaaagtggcaccgagtcggtgcgctccgtggccttagtgatgctgtgctcg

SEQ ID NO: 17804 - RNA, 124 nt, synthetic construct
  source 1..124: mol_type = other RNA
  modified_base 1: mod_base = OTHER; note = 2'-O-methyl modified nucleotide with phosphorothioate linkage
  modified_base 2: mod_base = OTHER; note = 2'-O-methyl modified nucleotide with phosphorothioate linkage
  modified_base 3: mod_base = OTHER; note = 2'-O-methyl modified nucleotide with phosphorothioate linkage
  modified_base 29: mod_base = OTHER; note = 2'-O-methyl modified nucleotide
  modified_base 30: mod_base = OTHER; note = 2'-O-methyl modified nucleotide
  modified_base 31: mod_base = OTHER; note = 2'-O-methyl modified nucleotide
  modified_base 32: mod_base = OTHER; note = 2'-O-methyl modified nucleotide
  modified_base 33: mod_base = OTHER; note = 2'-O-methyl modified nucleotide
  modified_base 34: mod_base = OTHER; note = 2'-O-methyl modified nucleotide
  modified_base 35: mod_base = OTHER; note = 2'-O-methyl modified nucleotide
  modified_base 36: mod_base = OTHER; note = 2'-O-methyl modified nucleotide
  modified_base 37: mod_base = OTHER; note = 2'-O-methyl modified nucleotide
  modified_base 38: mod_base = OTHER; note = 2'-O-methyl modified nucleotide
  modified_base 39: mod_base = OTHER; note = 2'-O-methyl modified nucleotide
  modified_base 40: mod_base = OTHER; note = 2'-O-methyl modified nucleotide
  modified_base 69: mod_base = OTHER; note = 2'-O-methyl modified nucleotide
  modified_base 70: mod_base = OTHER; note = 2'-O-methyl modified nucleotide
  modified_base 71: mod_base = OTHER; note = 2'-O-methyl modified nucleotide
  modified_base 72: mod_base = OTHER; note = 2'-O-methyl modified nucleotide
  modified_base 73: mod_base = OTHER; note = 2'-O-methyl modified nucleotide
  modified_base 74: mod_base = OTHER; note = 2'-O-methyl modified nucleotide
  modified_base 75: mod_base = OTHER; note = 2'-O-methyl modified nucleotide
  modified_base 76: mod_base = OTHER; note = 2'-O-methyl modified nucleotide
  modified_base 77: mod_base = OTHER; note = 2'-O-methyl modified nucleotide
  modified_base 78: mod_base = OTHER; note = 2'-O-methyl modified nucleotide
  modified_base 79: mod_base = OTHER; note = 2'-O-methyl modified nucleotide
  modified_base 80: mod_base = OTHER; note = 2'-O-methyl modified nucleotide
  modified_base 81: mod_base = OTHER; note = 2'-O-methyl modified nucleotide
  modified_base 82: mod_base = OTHER; note = 2'-O-methyl modified nucleotide
  modified_base 83: mod_base = OTHER; note = 2'-O-methyl modified nucleotide
  modified_base 84: mod_base = OTHER; note = 2'-O-methyl modified nucleotide
  modified_base 85: mod_base = OTHER; note = 2'-O-methyl modified nucleotide
  modified_base 86: mod_base = OTHER; note = 2'-O-methyl modified nucleotide
  modified_base 87: mod_base = OTHER; note = 2'-O-methyl modified nucleotide
  modified_base 88: mod_base = OTHER; note = 2'-O-methyl modified nucleotide
  modified_base 89: mod_base = OTHER; note = 2'-O-methyl modified nucleotide
  modified_base 90: mod_base = OTHER; note = 2'-O-methyl modified nucleotide
  modified_base 91: mod_base = OTHER; note = 2'-O-methyl modified nucleotide
  modified_base 92: mod_base = OTHER; note = 2'-O-methyl modified nucleotide
  modified_base 93: mod_base = OTHER; note = 2'-O-methyl modified nucleotide
  modified_base 94: mod_base = OTHER; note = 2'-O-methyl modified nucleotide
  modified_base 95: mod_base = OTHER; note = 2'-O-methyl modified nucleotide
  modified_base 96: mod_base = OTHER; note = 2'-O-methyl modified nucleotide
  modified_base 121: mod_base = OTHER; note = Nucleotide with phosphorothioate linkage
  modified_base 122: mod_base = OTHER; note = 2'-O-methyl modified nucleotide with phosphorothioate linkage
  modified_base 123: mod_base = OTHER; note = 2'-O-methyl modified nucleotide with phosphorothioate linkage
  modified_base 124: mod_base = OTHER; note = 2'-O-methyl modified nucleotide
gagtagcgcgagcacagctagttttagagctagaaatagcaagttaaaataaggctagtccgttatcaacttgaaaaagtggcaccgagtcggtgcgctccgtggccttagtgatgctgtgctc

SEQ ID NO: 17805 - RNA, 131 nt, synthetic construct
  source 1..131: mol_type = other RNA
  modified_base 1: mod_base = OTHER; note = 2'-O-methyl modified nucleotide with phosphorothioate linkage
  modified_base 2: mod_base = OTHER; note = 2'-O-methyl modified nucleotide with phosphorothioate linkage
  modified_base 3: mod_base = OTHER; note = 2'-O-methyl modified nucleotide with phosphorothioate linkage
  modified_base 29: mod_base = OTHER; note = 2'-O-methyl modified nucleotide
  modified_base 30: mod_base = OTHER; note = 2'-O-methyl modified nucleotide
  modified_base 31: mod_base = OTHER; note = 2'-O-methyl modified nucleotide
  modified_base 32: mod_base = OTHER; note = 2'-O-methyl modified nucleotide
  modified_base 33: mod_base = OTHER; note = 2'-O-methyl modified nucleotide
  modified_base 34: mod_base = OTHER; note = 2'-O-methyl modified nucleotide
  modified_base 35: mod_base = OTHER; note = 2'-O-methyl modified nucleotide
  modified_base 36: mod_base = OTHER; note = 2'-O-methyl modified nucleotide
  modified_base 37: mod_base = OTHER; note = 2'-O-methyl modified nucleotide
  modified_base 38: mod_base = OTHER; note = 2'-O-methyl modified nucleotide
  modified_base 39: mod_base = OTHER; note = 2'-O-methyl modified nucleotide
  modified_base 40: mod_base = OTHER; note = 2'-O-methyl modified nucleotide
  modified_base 69: mod_base = OTHER; note = 2'-O-methyl modified nucleotide
  modified_base 70: mod_base = OTHER; note = 2'-O-methyl modified nucleotide
  modified_base 71: mod_base = OTHER; note = 2'-O-methyl modified nucleotide
  modified_base 72: mod_base = OTHER; note = 2'-O-methyl modified nucleotide
  modified_base 73: mod_base = OTHER; note = 2'-O-methyl modified nucleotide
  modified_base 74: mod_base = OTHER; note = 2'-O-methyl modified nucleotide
  modified_base 75: mod_base = OTHER; note = 2'-O-methyl modified nucleotide
  modified_base 76: mod_base = OTHER; note = 2'-O-methyl modified nucleotide
  modified_base 77: mod_base = OTHER; note = 2'-O-methyl modified nucleotide
  modified_base 78: mod_base = OTHER; note = 2'-O-methyl modified nucleotide
  modified_base 79: mod_base = OTHER; note = 2'-O-methyl modified nucleotide
  modified_base 80: mod_base = OTHER; note = 2'-O-methyl modified nucleotide
  modified_base 81: mod_base = OTHER; note = 2'-O-methyl modified nucleotide
  modified_base 82: mod_base = OTHER; note = 2'-O-methyl modified nucleotide
  modified_base 83: mod_base = OTHER; note = 2'-O-methyl modified nucleotide
  modified_base 84: mod_base = OTHER; note = 2'-O-methyl modified nucleotide
  modified_base 85: mod_base = OTHER; note = 2'-O-methyl modified nucleotide
  modified_base 86: mod_base = OTHER; note = 2'-O-methyl modified nucleotide
  modified_base 87: mod_base = OTHER; note = 2'-O-methyl modified nucleotide
  modified_base 88: mod_base = OTHER; note = 2'-O-methyl modified nucleotide
  modified_base 89: mod_base = OTHER; note = 2'-O-methyl modified nucleotide
  modified_base 90: mod_base = OTHER; note = 2'-O-methyl modified nucleotide
  modified_base 91: mod_base = OTHER; note = 2'-O-methyl modified nucleotide
  modified_base 92: mod_base = OTHER; note = 2'-O-methyl modified nucleotide
  modified_base 93: mod_base = OTHER; note = 2'-O-methyl modified nucleotide
  modified_base 94: mod_base = OTHER; note = 2'-O-methyl modified nucleotide
  modified_base 95: mod_base = OTHER; note = 2'-O-methyl modified nucleotide
  modified_base 96: mod_base = OTHER; note = 2'-O-methyl modified nucleotide
  modified_base 128: mod_base = OTHER; note = Nucleotide with phosphorothioate linkage
  modified_base 129: mod_base = OTHER; note = 2'-O-methyl modified nucleotide with phosphorothioate linkage
  modified_base 130: mod_base = OTHER; note = 2'-O-methyl modified nucleotide with phosphorothioate linkage
  modified_base 131: mod_base = OTHER; note = 2'-O-methyl modified nucleotide
gagtagcgcgagcacagctagttttagagctagaaatagcaagttaaaataaggctagtccgttatcaacttgaaaaagtggcaccgagtcggtgctcgctccgtggccttagtgatgctgtgctcgcgct

SEQ ID NO: 17806 - RNA, 130 nt, synthetic construct
  source 1..130: mol_type = other RNA
  modified_base 1: mod_base = OTHER; note = 2'-O-methyl modified nucleotide with phosphorothioate linkage
  modified_base 2: mod_base = OTHER; note = 2'-O-methyl modified nucleotide with phosphorothioate linkage
  modified_base 3: mod_base = OTHER; note = 2'-O-methyl modified nucleotide with phosphorothioate linkage
  modified_base 29: mod_base = OTHER; note = 2'-O-methyl modified nucleotide
  modified_base 30: mod_base = OTHER; note = 2'-O-methyl modified nucleotide
  modified_base 31: mod_base = OTHER; note = 2'-O-methyl modified nucleotide
  modified_base 32: mod_base = OTHER; note = 2'-O-methyl modified nucleotide
  modified_base 33: mod_base = OTHER; note = 2'-O-methyl modified nucleotide
  modified_base 34: mod_base = OTHER; note = 2'-O-methyl modified nucleotide
  modified_base 35: mod_base = OTHER; note = 2'-O-methyl modified nucleotide
  modified_base 36: mod_base = OTHER; note = 2'-O-methyl modified nucleotide
  modified_base 37: mod_base = OTHER; note = 2'-O-methyl modified nucleotide
  modified_base 38: mod_base = OTHER; note = 2'-O-methyl modified nucleotide
  modified_base 39: mod_base = OTHER; note = 2'-O-methyl modified nucleotide
  modified_base 40: mod_base = OTHER; note = 2'-O-methyl modified nucleotide
  modified_base 69: mod_base = OTHER; note = 2'-O-methyl modified nucleotide
  modified_base 70: mod_base = OTHER; note = 2'-O-methyl modified nucleotide
  modified_base 71: mod_base = OTHER; note = 2'-O-methyl modified nucleotide
  modified_base 72: mod_base = OTHER; note = 2'-O-methyl modified nucleotide
  modified_base 73: mod_base = OTHER; note = 2'-O-methyl modified nucleotide
  modified_base 74: mod_base = OTHER; note = 2'-O-methyl modified nucleotide
  modified_base 75: mod_base = OTHER; note = 2'-O-methyl modified nucleotide
  modified_base 76: mod_base = OTHER; note = 2'-O-methyl modified nucleotide
  modified_base 77: mod_base = OTHER; note = 2'-O-methyl modified nucleotide
  modified_base 78: mod_base = OTHER; note = 2'-O-methyl modified nucleotide
  modified_base 79: mod_base = OTHER; note = 2'-O-methyl modified nucleotide
  modified_base 80: mod_base = OTHER; note = 2'-O-methyl modified nucleotide
  modified_base 81: mod_base = OTHER; note = 2'-O-methyl modified nucleotide
  modified_base 82: mod_base = OTHER; note = 2'-O-methyl modified nucleotide
  modified_base 83: mod_base = OTHER; note = 2'-O-methyl modified nucleotide
  modified_base 84: mod_base = OTHER; note = 2'-O-methyl modified nucleotide
  modified_base 85: mod_base = OTHER; note = 2'-O-methyl modified nucleotide
  modified_base 86: mod_base = OTHER; note = 2'-O-methyl modified nucleotide
  modified_base 87: mod_base = OTHER; note = 2'-O-methyl modified nucleotide
  modified_base 88: mod_base = OTHER; note = 2'-O-methyl modified nucleotide
  modified_base 89: mod_base = OTHER; note = 2'-O-methyl modified nucleotide
  modified_base 90: mod_base = OTHER; note = 2'-O-methyl modified nucleotide
  modified_base 91: mod_base = OTHER; note = 2'-O-methyl modified nucleotide
  modified_base 92: mod_base = OTHER; note = 2'-O-methyl modified nucleotide
  modified_base 93: mod_base = OTHER; note = 2'-O-methyl modified nucleotide
  modified_base 94: mod_base = OTHER; note = 2'-O-methyl modified nucleotide
  modified_base 95: mod_base = OTHER; note = 2'-O-methyl modified nucleotide
  modified_base 96: mod_base = OTHER; note = 2'-O-methyl modified nucleotide
  modified_base 127: mod_base = OTHER; note = Nucleotide with phosphorothioate linkage
  modified_base 128: mod_base = OTHER; note = 2'-O-methyl modified nucleotide with phosphorothioate linkage
  modified_base 129: mod_base = OTHER; note = 2'-O-methyl modified nucleotide with phosphorothioate linkage
  modified_base 130: mod_base = OTHER; note = 2'-O-methyl modified nucleotide
gagtagcgcgagcacagctagttttagagctagaaatagcaagttaaaataaggctagtccgttatcaacttgaaaaagtggcaccgagtcggtgctcgctccgtggccttagtgatgctgtgctcgcgc

SEQ ID NO: 17807 - RNA, 129 nt, synthetic construct
  source 1..129: mol_type = other RNA
  modified_base 1: mod_base = OTHER; note = 2'-O-methyl modified nucleotide with phosphorothioate linkage
  modified_base 2: mod_base = OTHER; note = 2'-O-methyl modified nucleotide with phosphorothioate linkage
  modified_base 3: mod_base = OTHER; note = 2'-O-methyl modified nucleotide with phosphorothioate linkage
  modified_base 29: mod_base = OTHER; note = 2'-O-methyl modified nucleotide
  modified_base 30: mod_base = OTHER; note = 2'-O-methyl modified nucleotide
  modified_base 31: mod_base = OTHER; note = 2'-O-methyl modified nucleotide
  modified_base 32: mod_base = OTHER; note = 2'-O-methyl modified nucleotide
  modified_base 33: mod_base = OTHER; note = 2'-O-methyl modified nucleotide
  modified_base 34: mod_base = OTHER; note = 2'-O-methyl modified nucleotide
  modified_base 35: mod_base = OTHER; note = 2'-O-methyl modified nucleotide
  modified_base 36: mod_base = OTHER; note = 2'-O-methyl modified nucleotide
  modified_base 37: mod_base = OTHER; note = 2'-O-methyl modified nucleotide
  modified_base 38: mod_base = OTHER; note = 2'-O-methyl modified nucleotide
  modified_base 39: mod_base = OTHER; note = 2'-O-methyl modified nucleotide
  modified_base 40: mod_base = OTHER; note = 2'-O-methyl modified nucleotide
  modified_base 69: mod_base = OTHER; note = 2'-O-methyl modified nucleotide
  modified_base 70: mod_base = OTHER; note = 2'-O-methyl modified nucleotide
  modified_base 71: mod_base = OTHER; note = 2'-O-methyl modified nucleotide
  modified_base 72: mod_base = OTHER; note = 2'-O-methyl modified nucleotide
  modified_base 73: mod_base = OTHER; note = 2'-O-methyl modified nucleotide
  modified_base 74: mod_base = OTHER; note = 2'-O-methyl modified nucleotide
  modified_base 75: mod_base = OTHER; note = 2'-O-methyl modified nucleotide
  modified_base 76: mod_base = OTHER; note = 2'-O-methyl modified nucleotide
  modified_base 77: mod_base = OTHER; note = 2'-O-methyl modified nucleotide
  modified_base 78: mod_base = OTHER; note = 2'-O-methyl modified nucleotide
  modified_base 79: mod_base = OTHER; note = 2'-O-methyl modified nucleotide
  modified_base 80: mod_base = OTHER; note = 2'-O-methyl modified nucleotide
  modified_base 81: mod_base = OTHER; note = 2'-O-methyl modified nucleotide
  modified_base 82: mod_base = OTHER; note = 2'-O-methyl modified nucleotide
  modified_base 83: mod_base = OTHER; note = 2'-O-methyl modified nucleotide
  modified_base 84: mod_base = OTHER; note = 2'-O-methyl modified nucleotide
  modified_base 85: mod_base = OTHER; note = 2'-O-methyl modified nucleotide
  modified_base 86: mod_base = OTHER; note = 2'-O-methyl modified nucleotide
  modified_base 87: mod_base = OTHER; note = 2'-O-methyl modified nucleotide
  modified_base 88: mod_base = OTHER; note = 2'-O-methyl modified nucleotide
  modified_base 89: mod_base = OTHER; note = 2'-O-methyl modified nucleotide
  modified_base 90: mod_base = OTHER; note = 2'-O-methyl modified nucleotide
  modified_base 91: mod_base = OTHER; note = 2'-O-methyl modified nucleotide
  modified_base 92: mod_base = OTHER; note = 2'-O-methyl modified nucleotide
  modified_base 93: mod_base = OTHER; note = 2'-O-methyl modified nucleotide
  modified_base 94: mod_base = OTHER; note = 2'-O-methyl modified nucleotide
  modified_base 95: mod_base = OTHER; note = 2'-O-methyl modified nucleotide
  modified_base 96: mod_base = OTHER; note = 2'-O-methyl modified nucleotide
  modified_base 126: mod_base = OTHER; note = Nucleotide with phosphorothioate linkage
  modified_base 127: mod_base = OTHER; note = 2'-O-methyl modified nucleotide with phosphorothioate linkage
  modified_base 128: mod_base = OTHER; note = 2'-O-methyl modified nucleotide with phosphorothioate linkage
  modified_base 129: mod_base = OTHER; note = 2'-O-methyl modified nucleotide
gagtagcgcgagcacagctagttttagagctagaaatagcaagttaaaataaggctagtccgttatcaacttgaaaaagtggcaccgagtcggtgctcgctccgtggccttagtgatgctgtgctcgcg

SEQ ID NO: 17808 - RNA, 128 nt, synthetic construct
  source 1..128: mol_type = other RNA
  modified_base 1: mod_base = OTHER; note = 2'-O-methyl modified nucleotide with phosphorothioate linkage
  modified_base 2: mod_base = OTHER; note = 2'-O-methyl modified nucleotide with phosphorothioate linkage
  modified_base 3: mod_base = OTHER; note = 2'-O-methyl modified nucleotide with phosphorothioate linkage
  modified_base 29: mod_base = OTHER; note = 2'-O-methyl modified nucleotide
  modified_base 30: mod_base = OTHER; note = 2'-O-methyl modified nucleotide
  modified_base 31: mod_base = OTHER; note = 2'-O-methyl modified nucleotide
  modified_base 32: mod_base = OTHER; note = 2'-O-methyl modified nucleotide
  modified_base 33: mod_base = OTHER; note = 2'-O-methyl modified nucleotide
  modified_base 34: mod_base = OTHER; note = 2'-O-methyl modified nucleotide
  modified_base 35: mod_base = OTHER; note = 2'-O-methyl modified nucleotide
  modified_base 36: mod_base = OTHER; note = 2'-O-methyl modified nucleotide
  modified_base 37: mod_base = OTHER; note = 2'-O-methyl modified nucleotide
  modified_base 38: mod_base = OTHER; note = 2'-O-methyl modified nucleotide
  modified_base 39: mod_base = OTHER; note = 2'-O-methyl modified nucleotide
  modified_base 40: mod_base = OTHER; note = 2'-O-methyl modified nucleotide
  modified_base 69: mod_base = OTHER; note = 2'-O-methyl modified nucleotide
  modified_base 70: mod_base = OTHER; note = 2'-O-methyl modified nucleotide
  modified_base 71: mod_base = OTHER; note = 2'-O-methyl modified nucleotide
  modified_base 72: mod_base = OTHER; note = 2'-O-methyl modified nucleotide
  modified_base 73: mod_base = OTHER; note = 2'-O-methyl modified nucleotide
  modified_base 74: mod_base = OTHER; note = 2'-O-methyl modified nucleotide
  modified_base 75: mod_base = OTHER; note = 2'-O-methyl modified nucleotide
  modified_base 76: mod_base = OTHER; note = 2'-O-methyl modified nucleotide
  modified_base 77: mod_base = OTHER; note = 2'-O-methyl modified nucleotide
  modified_base 78: mod_base = OTHER; note = 2'-O-methyl modified nucleotide
  modified_base 79: mod_base = OTHER; note = 2'-O-methyl modified nucleotide
  modified_base 80: mod_base = OTHER; note = 2'-O-methyl modified nucleotide
  modified_base 81: mod_base = OTHER; note = 2'-O-methyl modified nucleotide
  modified_base 82: mod_base = OTHER; note = 2'-O-methyl modified nucleotide
  modified_base 83: mod_base = OTHER; note = 2'-O-methyl modified nucleotide
  modified_base 84: mod_base = OTHER; note = 2'-O-methyl modified nucleotide
  modified_base 85: mod_base = OTHER; note = 2'-O-methyl modified nucleotide
  modified_base 86: mod_base = OTHER; note = 2'-O-methyl modified nucleotide
  modified_base 87: mod_base = OTHER; note = 2'-O-methyl modified nucleotide
  modified_base 88: mod_base = OTHER; note = 2'-O-methyl modified nucleotide
  modified_base 89: mod_base = OTHER; note = 2'-O-methyl modified nucleotide
  modified_base 90: mod_base = OTHER; note = 2'-O-methyl modified nucleotide
  modified_base 91: mod_base = OTHER; note = 2'-O-methyl modified nucleotide
  modified_base 92: mod_base = OTHER; note = 2'-O-methyl modified nucleotide
  modified_base 93: mod_base = OTHER; note = 2'-O-methyl modified nucleotide
  modified_base 94: mod_base = OTHER; note = 2'-O-methyl modified nucleotide
  modified_base 95: mod_base = OTHER; note = 2'-O-methyl modified nucleotide
  modified_base 96: mod_base = OTHER; note = 2'-O-methyl modified nucleotide
  modified_base 125: mod_base = OTHER; note = Nucleotide with phosphorothioate linkage
  modified_base 126: mod_base = OTHER; note = 2'-O-methyl modified nucleotide with phosphorothioate linkage
  modified_base 127: mod_base = OTHER; note = 2'-O-methyl modified nucleotide with phosphorothioate linkage
  modified_base 128: mod_base = OTHER; note = 2'-O-methyl modified nucleotide
gagtagcgcgagcacagctagttttagagctagaaatagcaagttaaaataaggctagtccgttatcaacttgaaaaagtggcaccgagtcggtgctcgctccgtggccttagtgatgctgtgctcgc

SEQ ID NO: 17809 - RNA, 127 nt, synthetic construct
  source 1..127: mol_type = other RNA
  modified_base 1: mod_base = OTHER; note = 2'-O-methyl modified nucleotide with phosphorothioate linkage
  modified_base 2: mod_base = OTHER; note = 2'-O-methyl modified nucleotide with phosphorothioate linkage
  modified_base 3: mod_base = OTHER; note = 2'-O-methyl modified nucleotide with phosphorothioate linkage
  modified_base 29: mod_base = OTHER; note = 2'-O-methyl modified nucleotide
  modified_base 30: mod_base = OTHER; note = 2'-O-methyl modified nucleotide
  modified_base 31: mod_base = OTHER; note = 2'-O-methyl modified nucleotide
  modified_base 32: mod_base = OTHER; note = 2'-O-methyl modified nucleotide
  modified_base 33: mod_base = OTHER; note = 2'-O-methyl modified nucleotide
  modified_base 34: mod_base = OTHER; note = 2'-O-methyl modified nucleotide
  modified_base 35: mod_base = OTHER; note = 2'-O-methyl modified nucleotide
  modified_base 36: mod_base = OTHER; note = 2'-O-methyl modified nucleotide
  modified_base 37: mod_base = OTHER; note = 2'-O-methyl modified nucleotide
  modified_base 38: mod_base = OTHER; note = 2'-O-methyl modified nucleotide
  modified_base 39: mod_base = OTHER; note = 2'-O-methyl modified nucleotide
  modified_base 40: mod_base = OTHER; note = 2'-O-methyl modified nucleotide
  modified_base 69: mod_base = OTHER; note = 2'-O-methyl modified nucleotide
  modified_base 70: mod_base = OTHER; note = 2'-O-methyl modified nucleotide
  modified_base 71: mod_base = OTHER; note = 2'-O-methyl modified nucleotide
  modified_base 72: mod_base = OTHER; note = 2'-O-methyl modified nucleotide
  modified_base 73: mod_base = OTHER; note = 2'-O-methyl modified nucleotide
  modified_base 74: mod_base = OTHER; note = 2'-O-methyl modified nucleotide
  modified_base 75: mod_base = OTHER; note = 2'-O-methyl modified nucleotide
  modified_base 76: mod_base = OTHER; note = 2'-O-methyl modified nucleotide
  modified_base 77: mod_base = OTHER; note = 2'-O-methyl modified nucleotide
  modified_base 78: mod_base = OTHER; note = 2'-O-methyl modified nucleotide
  modified_base 79: mod_base = OTHER; note = 2'-O-methyl modified nucleotide
  modified_base 80: mod_base = OTHER; note = 2'-O-methyl modified nucleotide
  modified_base 81: mod_base = OTHER; note = 2'-O-methyl modified nucleotide
  modified_base 82: mod_base = OTHER; note = 2'-O-methyl modified nucleotide
  modified_base 83: mod_base = OTHER; note = 2'-O-methyl modified nucleotide
  modified_base 84: mod_base = OTHER; note = 2'-O-methyl modified nucleotide
  modified_base 85: mod_base = OTHER; note = 2'-O-methyl modified nucleotide
  modified_base 86: mod_base = OTHER; note = 2'-O-methyl modified nucleotide
  modified_base 87: mod_base = OTHER; note = 2'-O-methyl modified nucleotide
  modified_base 88: mod_base = OTHER; note = 2'-O-methyl modified nucleotide
  modified_base 89: mod_base = OTHER; note = 2'-O-methyl modified nucleotide
  modified_base 90: mod_base = OTHER; note = 2'-O-methyl modified nucleotide
  modified_base 91: mod_base = OTHER; note = 2'-O-methyl modified nucleotide
  modified_base 92: mod_base = OTHER; note = 2'-O-methyl modified nucleotide
  modified_base 93: mod_base = OTHER; note = 2'-O-methyl modified nucleotide
  modified_base 94: mod_base = OTHER; note = 2'-O-methyl modified nucleotide
  modified_base 95: mod_base = OTHER; note = 2'-O-methyl modified nucleotide
  modified_base 96: mod_base = OTHER; note = 2'-O-methyl modified nucleotide
  modified_base 124: mod_base = OTHER; note = Nucleotide with phosphorothioate linkage
  modified_base 125: mod_base = OTHER; note = 2'-O-methyl modified nucleotide with phosphorothioate linkage
  modified_base 126: mod_base = OTHER; note = 2'-O-methyl modified nucleotide with phosphorothioate linkage
  modified_base 127: mod_base = OTHER; note = 2'-O-methyl modified nucleotide
gagtagcgcgagcacagctagttttagagctagaaatagcaagttaaaataaggctagtccgttatcaacttgaaaaagtggcaccgagtcggtgctcgctccgtggccttagtgatgctgtgctcg

SEQ ID NO: 17810 - RNA, 126 nt, synthetic construct
  source 1..126: mol_type = other RNA
  modified_base 1: mod_base = OTHER; note = 2'-O-methyl modified nucleotide with phosphorothioate linkage
  modified_base 2: mod_base = OTHER; note = 2'-O-methyl modified nucleotide with phosphorothioate linkage
  modified_base 3: mod_base = OTHER; note = 2'-O-methyl modified nucleotide with phosphorothioate linkage
  modified_base 29: mod_base = OTHER; note = 2'-O-methyl modified nucleotide
  modified_base 30: mod_base = OTHER; note = 2'-O-methyl modified nucleotide
  modified_base 31: mod_base = OTHER; note = 2'-O-methyl modified nucleotide
  modified_base 32: mod_base = OTHER; note = 2'-O-methyl modified nucleotide
  modified_base 33: mod_base = OTHER; note = 2'-O-methyl modified nucleotide
  modified_base 34: mod_base = OTHER; note = 2'-O-methyl modified nucleotide
  modified_base 35: mod_base = OTHER; note = 2'-O-methyl modified nucleotide
  modified_base 36: mod_base = OTHER; note = 2'-O-methyl modified nucleotide
  modified_base 37: mod_base = OTHER; note = 2'-O-methyl modified nucleotide
  modified_base 38: mod_base = OTHER; note = 2'-O-methyl modified nucleotide
  modified_base 39: mod_base = OTHER; note = 2'-O-methyl modified nucleotide
  modified_base 40: mod_base = OTHER; note = 2'-O-methyl modified nucleotide
  modified_base 69: mod_base = OTHER; note = 2'-O-methyl modified nucleotide
  modified_base 70: mod_base = OTHER; note = 2'-O-methyl modified nucleotide
  modified_base 71: mod_base = OTHER; note = 2'-O-methyl modified nucleotide
  modified_base 72: mod_base = OTHER; note = 2'-O-methyl modified nucleotide
  modified_base 73: mod_base = OTHER; note = 2'-O-methyl modified nucleotide
  modified_base 74: mod_base = OTHER; note = 2'-O-methyl modified nucleotide
  modified_base 75: mod_base = OTHER; note = 2'-O-methyl modified nucleotide
  modified_base 76: mod_base = OTHER; note = 2'-O-methyl modified nucleotide
  modified_base 77: mod_base = OTHER; note = 2'-O-methyl modified nucleotide
  modified_base 78: mod_base = OTHER; note = 2'-O-methyl modified nucleotide
  modified_base 79: mod_base = OTHER; note = 2'-O-methyl modified nucleotide
  modified_base 80: mod_base = OTHER; note = 2'-O-methyl modified nucleotide
  modified_base 81: mod_base = OTHER; note = 2'-O-methyl modified nucleotide
  modified_base 82: mod_base = OTHER; note = 2'-O-methyl modified nucleotide
  modified_base 83: mod_base = OTHER; note = 2'-O-methyl modified nucleotide
  modified_base 84: mod_base = OTHER; note = 2'-O-methyl modified nucleotide
  modified_base 85: mod_base = OTHER; note = 2'-O-methyl modified nucleotide
  modified_base 86: mod_base = OTHER; note = 2'-O-methyl modified nucleotide
  modified_base 87: mod_base = OTHER; note = 2'-O-methyl modified nucleotide
  modified_base 88: mod_base = OTHER; note = 2'-O-methyl modified nucleotide
  modified_base 89: mod_base = OTHER; note = 2'-O-methyl modified nucleotide
  modified_base 90: mod_base = OTHER; note = 2'-O-methyl modified nucleotide
  modified_base 91: mod_base = OTHER; note = 2'-O-methyl modified nucleotide
  modified_base 92: mod_base = OTHER; note = 2'-O-methyl modified nucleotide
  modified_base 93: mod_base = OTHER; note = 2'-O-methyl modified nucleotide
  modified_base 94: mod_base = OTHER; note = 2'-O-methyl modified nucleotide
  modified_base 95: mod_base = OTHER; note = 2'-O-methyl modified nucleotide
  modified_base 96: mod_base = OTHER; note = 2'-O-methyl modified nucleotide
  modified_base 123: mod_base = OTHER; note = Nucleotide with phosphorothioate linkage
  modified_base 124: mod_base = OTHER; note = 2'-O-methyl modified nucleotide with phosphorothioate linkage
  modified_base 125: mod_base = OTHER; note = 2'-O-methyl modified nucleotide with phosphorothioate linkage
  modified_base 126: mod_base = OTHER; note = 2'-O-methyl modified nucleotide
gagtagcgcgagcacagctagttttagagctagaaatagcaagttaaaataaggctagtccgttatcaacttgaaaaagtggcaccgagtcggtgctcgctccgtggccttagtgatgctgtgctc

SEQ ID NO: 17811 - RNA, 133 nt, synthetic construct
  source 1..133: mol_type = other RNA
  modified_base 1: mod_base = OTHER; note = 2'-O-methyl modified nucleotide with phosphorothioate linkage
  modified_base 2: mod_base = OTHER; note = 2'-O-methyl modified nucleotide with phosphorothioate linkage
  modified_base 3: mod_base = OTHER; note = 2'-O-methyl modified nucleotide with phosphorothioate linkage
  modified_base 29: mod_base = OTHER; note = 2'-O-methyl modified nucleotide
  modified_base 30: mod_base = OTHER; note = 2'-O-methyl modified nucleotide
  modified_base 31: mod_base = OTHER; note = 2'-O-methyl modified nucleotide
  modified_base 32: mod_base = OTHER; note = 2'-O-methyl modified nucleotide
  modified_base 33: mod_base = OTHER; note = 2'-O-methyl modified nucleotide
  modified_base 34: mod_base = OTHER; note = 2'-O-methyl modified nucleotide
  modified_base 35: mod_base = OTHER; note = 2'-O-methyl modified nucleotide
  modified_base 36: mod_base = OTHER; note = 2'-O-methyl modified nucleotide
  modified_base 37: mod_base = OTHER; note = 2'-O-methyl modified nucleotide
  modified_base 38: mod_base = OTHER; note = 2'-O-methyl modified nucleotide
  modified_base 39: mod_base = OTHER; note = 2'-O-methyl modified nucleotide
  modified_base 40: mod_base = OTHER; note = 2'-O-methyl modified nucleotide
  modified_base 69: mod_base = OTHER; note = 2'-O-methyl modified nucleotide
  modified_base 70: mod_base = OTHER; note = 2'-O-methyl modified nucleotide
  modified_base 71: mod_base = OTHER; note = 2'-O-methyl modified nucleotide
  modified_base 72: mod_base = OTHER; note = 2'-O-methyl modified nucleotide
  modified_base 73: mod_base = OTHER; note = 2'-O-methyl modified nucleotide
  modified_base 74: mod_base = OTHER; note = 2'-O-methyl modified nucleotide
  modified_base 75: mod_base = OTHER; note = 2'-O-methyl modified nucleotide
  modified_base 76: mod_base = OTHER; note = 2'-O-methyl modified nucleotide
  modified_base 77: mod_base = OTHER; note = 2'-O-methyl modified nucleotide
  modified_base 78: mod_base = OTHER; note = 2'-O-methyl modified nucleotide
  modified_base 79: mod_base = OTHER; note = 2'-O-methyl modified nucleotide
  modified_base 80: mod_base = OTHER; note = 2'-O-methyl modified nucleotide
  modified_base 81: mod_base = OTHER; note = 2'-O-methyl modified nucleotide
  modified_base 82: mod_base = OTHER; note = 2'-O-methyl modified nucleotide
  modified_base 83: mod_base = OTHER; note = 2'-O-methyl modified nucleotide
  modified_base 84: mod_base = OTHER; note = 2'-O-methyl modified nucleotide
  modified_base 85: mod_base = OTHER; note = 2'-O-methyl modified nucleotide
  modified_base 86: mod_base = OTHER; note = 2'-O-methyl modified nucleotide
  modified_base 87: mod_base = OTHER; note = 2'-O-methyl modified nucleotide
  modified_base 88: mod_base = OTHER; note = 2'-O-methyl modified nucleotide
  modified_base 89: mod_base = OTHER; note = 2'-O-methyl modified nucleotide
  modified_base 90: mod_base = OTHER; note = 2'-O-methyl modified nucleotide
  modified_base 91: mod_base = OTHER; note = 2'-O-methyl modified nucleotide
  modified_base 92: mod_base = OTHER; note = 2'-O-methyl modified nucleotide
  modified_base 93: mod_base = OTHER; note = 2'-O-methyl modified nucleotide
  modified_base 94: mod_base = OTHER; note = 2'-O-methyl modified nucleotide
  modified_base 95: mod_base = OTHER; note = 2'-O-methyl modified nucleotide
  modified_base 96: mod_base = OTHER; note = 2'-O-methyl modified nucleotide
  modified_base 130: mod_base = OTHER; note = Nucleotide with phosphorothioate linkage
  modified_base 131: mod_base = OTHER; note = 2'-O-methyl modified nucleotide with phosphorothioate linkage
  modified_base 132: mod_base = OTHER; note = 2'-O-methyl modified nucleotide with phosphorothioate linkage
  modified_base 133: mod_base = OTHER; note = 2'-O-methyl modified nucleotide
gagtagcgcgagcacagctagttttagagctagaaatagcaagttaaaataaggctagtccgttatcaacttgaaaaagtggcaccgagtcggtgctctcgctccgtggccttagtgatgctgtgctcgcgct

SEQ ID NO: 17812 - RNA, 132 nt, synthetic construct
  source 1..132: mol_type = other RNA
  modified_base 1: mod_base = OTHER; note = 2'-O-methyl modified nucleotide with phosphorothioate linkage
  modified_base 2: mod_base = OTHER; note = 2'-O-methyl modified nucleotide with phosphorothioate linkage
  modified_base 3: mod_base = OTHER; note = 2'-O-methyl modified nucleotide with phosphorothioate linkage
  modified_base 29: mod_base = OTHER; note = 2'-O-methyl modified nucleotide
  modified_base 30: mod_base = OTHER; note = 2'-O-methyl modified nucleotide
  modified_base 31: mod_base = OTHER; note = 2'-O-methyl modified nucleotide
  modified_base 32: mod_base = OTHER; note = 2'-O-methyl modified nucleotide
  modified_base 33: mod_base = OTHER; note = 2'-O-methyl modified nucleotide
  modified_base 34: mod_base = OTHER; note = 2'-O-methyl modified nucleotide
  modified_base 35: mod_base = OTHER; note = 2'-O-methyl modified nucleotide
  modified_base 36: mod_base = OTHER; note = 2'-O-methyl modified nucleotide
  modified_base 37: mod_base = OTHER; note = 2'-O-methyl modified nucleotide
  modified_base 38: mod_base = OTHER; note = 2'-O-methyl modified nucleotide
  modified_base 39: mod_base = OTHER; note = 2'-O-methyl modified nucleotide
  modified_base 40: mod_base = OTHER; note = 2'-O-methyl modified nucleotide
  modified_base 69: mod_base = OTHER; note = 2'-O-methyl modified nucleotide
  modified_base 70: mod_base = OTHER; note = 2'-O-methyl modified nucleotide
  modified_base 71: mod_base = OTHER; note = 2'-O-methyl modified nucleotide
  modified_base 72: mod_base = OTHER; note = 2'-O-methyl modified nucleotide
  modified_base 73: mod_base = OTHER; note = 2'-O-methyl modified nucleotide
  modified_base 74: mod_base = OTHER; note = 2'-O-methyl modified nucleotide
  modified_base 75: mod_base = OTHER; note = 2'-O-methyl modified nucleotide
  modified_base 76: mod_base = OTHER; note = 2'-O-methyl modified nucleotide
  modified_base 77: mod_base = OTHER; note = 2'-O-methyl modified nucleotide
  modified_base 78: mod_base = OTHER; note = 2'-O-methyl modified nucleotide
  modified_base 79: mod_base = OTHER; note = 2'-O-methyl modified nucleotide
  modified_base 80: mod_base = OTHER; note = 2'-O-methyl modified nucleotide
  modified_base 81: mod_base = OTHER; note = 2'-O-methyl modified nucleotide
  modified_base 82: mod_base = OTHER; note = 2'-O-methyl modified nucleotide
  modified_base 83: mod_base = OTHER; note = 2'-O-methyl modified nucleotide
  modified_base 84: mod_base = OTHER; note = 2'-O-methyl modified nucleotide
  modified_base 85: mod_base = OTHER; note = 2'-O-methyl modified nucleotide
  modified_base 86: mod_base = OTHER; note = 2'-O-methyl modified nucleotide
  modified_base 87: mod_base = OTHER; note = 2'-O-methyl modified nucleotide
  modified_base 88: mod_base = OTHER; note = 2'-O-methyl modified nucleotide
  modified_base 89: mod_base = OTHER; note = 2'-O-methyl modified nucleotide
  modified_base 90: mod_base = OTHER; note = 2'-O-methyl modified nucleotide
  modified_base 91: mod_base = OTHER; note = 2'-O-methyl modified nucleotide
  modified_base 92: mod_base = OTHER; note = 2'-O-methyl modified nucleotide
  modified_base 93: mod_base = OTHER; note = 2'-O-methyl modified nucleotide
  modified_base 94: mod_base = OTHER; note = 2'-O-methyl modified nucleotide
  modified_base 95: mod_base = OTHER; note = 2'-O-methyl modified nucleotide
  modified_base 96: mod_base = OTHER; note = 2'-O-methyl modified nucleotide
  modified_base 129: mod_base = OTHER; note = Nucleotide with phosphorothioate linkage
  modified_base 130: mod_base = OTHER; note = 2'-O-methyl modified nucleotide with phosphorothioate linkage
  modified_base 131: mod_base = OTHER; note = 2'-O-methyl modified nucleotide with phosphorothioate linkage
  modified_base 132: mod_base = OTHER; note = 2'-O-methyl modified nucleotide
gagtagcgcgagcacagctagttttagagctagaaatagcaagttaaaataaggctagtccgttatcaacttgaaaaagtggcaccgagtcggtgctctcgctccgtggccttagtgatgctgtgctcgcgc

SEQ ID NO: 17813 - RNA, 131 nt, synthetic construct
  source 1..131: mol_type = other RNA
  modified_base 1: mod_base = OTHER; note = 2'-O-methyl modified nucleotide with phosphorothioate linkage
  modified_base 2: mod_base = OTHER; note = 2'-O-methyl modified nucleotide with phosphorothioate linkage
  modified_base 3: mod_base = OTHER; note = 2'-O-methyl modified nucleotide with phosphorothioate linkage
  modified_base 29: mod_base = OTHER; note = 2'-O-methyl modified nucleotide
  modified_base 30: mod_base = OTHER; note = 2'-O-methyl modified nucleotide
  modified_base 31: mod_base = OTHER; note = 2'-O-methyl modified nucleotide
  modified_base 32: mod_base = OTHER; note = 2'-O-methyl modified nucleotide
  modified_base 33: mod_base = OTHER; note = 2'-O-methyl modified nucleotide
  modified_base 34: mod_base = OTHER; note = 2'-O-methyl modified nucleotide
  modified_base 35: mod_base = OTHER; note = 2'-O-methyl modified nucleotide
  modified_base 36: mod_base = OTHER; note = 2'-O-methyl modified nucleotide
  modified_base 37: mod_base = OTHER; note = 2'-O-methyl modified nucleotide
  modified_base 38: mod_base = OTHER; note = 2'-O-methyl modified nucleotide
  modified_base 39: mod_base = OTHER; note = 2'-O-methyl modified nucleotide
  modified_base 40: mod_base = OTHER; note = 2'-O-methyl modified nucleotide
  modified_base 69: mod_base = OTHER; note = 2'-O-methyl modified nucleotide
  modified_base 70: mod_base = OTHER; note = 2'-O-methyl modified nucleotide
  modified_base 71: mod_base = OTHER; note = 2'-O-methyl modified nucleotide
  modified_base 72: mod_base = OTHER; note = 2'-O-methyl modified nucleotide
  modified_base 73: mod_base = OTHER; note = 2'-O-methyl modified nucleotide
  modified_base 74: mod_base = OTHER; note = 2'-O-methyl modified nucleotide
  modified_base 75: mod_base = OTHER; note = 2'-O-methyl modified nucleotide
  modified_base 76: mod_base = OTHER; note = 2'-O-methyl modified nucleotide
  modified_base 77: mod_base = OTHER; note = 2'-O-methyl modified nucleotide
  modified_base 78: mod_base = OTHER; note = 2'-O-methyl modified nucleotide
  modified_base 79: mod_base = OTHER; note = 2'-O-methyl modified nucleotide
  modified_base 80: mod_base = OTHER; note = 2'-O-methyl modified nucleotide
  modified_base 81: mod_base = OTHER; note = 2'-O-methyl modified nucleotide
  modified_base 82: mod_base = OTHER; note = 2'-O-methyl modified nucleotide
  modified_base 83: mod_base = OTHER; note = 2'-O-methyl modified nucleotide
  modified_base 84: mod_base = OTHER; note = 2'-O-methyl modified nucleotide
  modified_base 85: mod_base = OTHER; note = 2'-O-methyl modified nucleotide
  modified_base 86: mod_base = OTHER; note = 2'-O-methyl modified nucleotide
  modified_base 87: mod_base = OTHER; note = 2'-O-methyl modified nucleotide
  modified_base 88: mod_base = OTHER; note = 2'-O-methyl modified nucleotide
  modified_base 89: mod_base = OTHER; note = 2'-O-methyl modified nucleotide
  modified_base 90: mod_base = OTHER; note = 2'-O-methyl modified nucleotide
  modified_base 91: mod_base = OTHER; note = 2'-O-methyl modified nucleotide
  modified_base 92: mod_base = OTHER; note = 2'-O-methyl modified nucleotide
  modified_base 93: mod_base = OTHER; note = 2'-O-methyl modified nucleotide
  modified_base 94: mod_base = OTHER; note = 2'-O-methyl modified nucleotide
  modified_base 95: mod_base = OTHER; note = 2'-O-methyl modified nucleotide
  modified_base 96: mod_base = OTHER; note = 2'-O-methyl modified nucleotide
  modified_base 128: mod_base = OTHER; note = Nucleotide with phosphorothioate linkage
  modified_base 129: mod_base = OTHER; note = 2'-O-methyl modified nucleotide with phosphorothioate linkage
  modified_base 130: mod_base = OTHER; note = 2'-O-methyl modified nucleotide with phosphorothioate linkage
  modified_base 131: mod_base = OTHER; note = 2'-O-methyl modified nucleotide
gagtagcgcgagcacagctagttttagagctagaaatagcaagttaaaataaggctagtccgttatcaacttgaaaaagtggcaccgagtcggtgctctcgctccgtggccttagtgatgctgtgctcgcg

SEQ ID NO: 17814 - RNA, 130 nt, synthetic construct
  source 1..130: mol_type = other RNA
  modified_base 1: mod_base = OTHER; note = 2'-O-methyl modified nucleotide with phosphorothioate linkage
  modified_base 2: mod_base = OTHER; note = 2'-O-methyl modified nucleotide with phosphorothioate linkage
  modified_base 3: mod_base = OTHER; note = 2'-O-methyl modified nucleotide with phosphorothioate linkage
  modified_base 29: mod_base = OTHER; note = 2'-O-methyl modified nucleotide
  modified_base 30: mod_base = OTHER; note = 2'-O-methyl modified nucleotide
  modified_base 31: mod_base = OTHER; note = 2'-O-methyl modified nucleotide
  modified_base 32: mod_base = OTHER; note = 2'-O-methyl modified nucleotide
  modified_base 33: mod_base = OTHER; note = 2'-O-methyl modified nucleotide
  modified_base 34: mod_base = OTHER; note = 2'-O-methyl modified nucleotide
  modified_base 35: mod_base = OTHER; note = 2'-O-methyl modified nucleotide
  modified_base 36: mod_base = OTHER; note = 2'-O-methyl modified nucleotide
  modified_base 37: mod_base = OTHER; note = 2'-O-methyl modified nucleotide
  modified_base 38: mod_base = OTHER; note = 2'-O-methyl modified nucleotide
  modified_base 39: mod_base = OTHER; note = 2'-O-methyl modified nucleotide
  modified_base 40: mod_base = OTHER; note = 2'-O-methyl modified nucleotide
  modified_base 69: mod_base = OTHER; note = 2'-O-methyl modified nucleotide
  modified_base 70: mod_base = OTHER; note = 2'-O-methyl modified nucleotide
  modified_base 71: mod_base = OTHER; note = 2'-O-methyl modified nucleotide
  modified_base 72: mod_base = OTHER; note = 2'-O-methyl modified nucleotide
  modified_base 73: mod_base = OTHER; note = 2'-O-methyl modified nucleotide
  modified_base 74: mod_base = OTHER; note = 2'-O-methyl modified nucleotide
  modified_base 75: mod_base = OTHER; note = 2'-O-methyl modified nucleotide
  modified_base 76: mod_base = OTHER; note = 2'-O-methyl modified nucleotide
  modified_base 77: mod_base = OTHER; note = 2'-O-methyl modified nucleotide
  modified_base 78: mod_base = OTHER; note = 2'-O-methyl modified nucleotide
  modified_base 79: mod_base = OTHER; note = 2'-O-methyl modified nucleotide
  modified_base 80: mod_base = OTHER; note = 2'-O-methyl modified nucleotide
  modified_base 81: mod_base = OTHER; note = 2'-O-methyl modified nucleotide
  modified_base 82: mod_base = OTHER; note = 2'-O-methyl modified nucleotide
  modified_base 83: mod_base = OTHER; note = 2'-O-methyl modified nucleotide
  modified_base 84: mod_base = OTHER; note = 2'-O-methyl modified nucleotide
  modified_base 85: mod_base = OTHER; note = 2'-O-methyl modified nucleotide
  modified_base 86: mod_base = OTHER; note = 2'-O-methyl modified nucleotide
  modified_base 87: mod_base = OTHER; note = 2'-O-methyl modified nucleotide
  modified_base 88: mod_base = OTHER; note = 2'-O-methyl modified nucleotide
  modified_base 89: mod_base = OTHER; note = 2'-O-methyl modified nucleotide
  modified_base 90: mod_base = OTHER; note = 2'-O-methyl modified nucleotide
  modified_base 91: mod_base = OTHER; note = 2'-O-methyl modified nucleotide
  modified_base 92: mod_base = OTHER; note = 2'-O-methyl modified nucleotide
  modified_base 93: mod_base = OTHER; note = 2'-O-methyl modified nucleotide
  modified_base 94: mod_base = OTHER; note = 2'-O-methyl modified nucleotide
  modified_base 95: mod_base = OTHER; note = 2'-O-methyl modified nucleotide
  modified_base 96: mod_base = OTHER; note = 2'-O-methyl modified nucleotide
  modified_base 127: mod_base = OTHER; note = Nucleotide with phosphorothioate linkage
  modified_base 128: mod_base = OTHER; note = 2'-O-methyl modified nucleotide with phosphorothioate linkage
  modified_base 129: mod_base = OTHER; note = 2'-O-methyl modified nucleotide with phosphorothioate linkage
  modified_base 130: mod_base = OTHER; note = 2'-O-methyl modified nucleotide
gagtagcgcgagcacagctagttttagagctagaaatagcaagttaaaataaggctagtccgttatcaacttgaaaaagtggcaccgagtcggtgctctcgctccgtggccttagtgatgctgtgctcgc

SEQ ID NO: 17815 - RNA, 129 nt, synthetic construct
  source 1..129: mol_type = other RNA
  modified_base 1: mod_base = OTHER; note = 2'-O-methyl modified nucleotide with phosphorothioate linkage
  modified_base 2: mod_base = OTHER; note = 2'-O-methyl modified nucleotide with phosphorothioate linkage
  modified_base 3: mod_base = OTHER; note = 2'-O-methyl modified nucleotide with phosphorothioate linkage
  modified_base 29: mod_base = OTHER; note = 2'-O-methyl modified nucleotide
  modified_base 30: mod_base = OTHER; note = 2'-O-methyl modified nucleotide
  modified_base 31: mod_base = OTHER; note = 2'-O-methyl modified nucleotide
  modified_base 32: mod_base = OTHER; note = 2'-O-methyl modified nucleotide
  modified_base 33: mod_base = OTHER; note = 2'-O-methyl modified nucleotide
  modified_base 34: mod_base = OTHER; note = 2'-O-methyl modified nucleotide
  modified_base 35: mod_base = OTHER; note = 2'-O-methyl modified nucleotide
  modified_base 36: mod_base = OTHER; note = 2'-O-methyl modified nucleotide
  modified_base 37: mod_base = OTHER; note = 2'-O-methyl modified nucleotide
  modified_base 38: mod_base = OTHER; note = 2'-O-methyl modified nucleotide
  modified_base 39: mod_base = OTHER; note = 2'-O-methyl modified nucleotide
  modified_base 40: mod_base = OTHER; note = 2'-O-methyl modified nucleotide
  modified_base 69: mod_base = OTHER; note = 2'-O-methyl modified nucleotide
  modified_base 70: mod_base = OTHER; note = 2'-O-methyl modified nucleotide
  modified_base 71: mod_base = OTHER; note = 2'-O-methyl modified nucleotide
  modified_base 72: mod_base = OTHER; note = 2'-O-methyl modified nucleotide
  modified_base 73: mod_base = OTHER; note = 2'-O-methyl modified nucleotide
  modified_base 74: mod_base = OTHER; note = 2'-O-methyl modified nucleotide
  modified_base 75: mod_base = OTHER; note = 2'-O-methyl modified nucleotide
  modified_base 76: mod_base = OTHER; note = 2'-O-methyl modified nucleotide
  modified_base 77: mod_base = OTHER; note = 2'-O-methyl modified nucleotide
  modified_base 78: mod_base = OTHER; note = 2'-O-methyl modified nucleotide
  modified_base 79: mod_base = OTHER; note = 2'-O-methyl modified nucleotide
  modified_base 80: mod_base = OTHER; note = 2'-O-methyl modified nucleotide
  modified_base 81: mod_base = OTHER; note = 2'-O-methyl modified nucleotide
  modified_base 82: mod_base = OTHER; note = 2'-O-methyl modified nucleotide
  modified_base 83: mod_base = OTHER; note = 2'-O-methyl modified nucleotide
  modified_base 84: mod_base = OTHER; note = 2'-O-methyl modified nucleotide
  modified_base 85: mod_base = OTHER; note = 2'-O-methyl modified nucleotide
  modified_base 86: mod_base = OTHER; note = 2'-O-methyl modified nucleotide
  modified_base 87: mod_base = OTHER; note = 2'-O-methyl modified nucleotide
  modified_base 88: mod_base = OTHER; note = 2'-O-methyl modified nucleotide
  modified_base 89: mod_base = OTHER; note = 2'-O-methyl modified nucleotide
  modified_base 90: mod_base = OTHER; note = 2'-O-methyl modified nucleotide
  modified_base 91: mod_base = OTHER; note = 2'-O-methyl modified nucleotide
  modified_base 92: mod_base = OTHER; note = 2'-O-methyl modified nucleotide
  modified_base 93: mod_base = OTHER; note = 2'-O-methyl modified nucleotide
  modified_base 94: mod_base = OTHER; note = 2'-O-methyl modified nucleotide
  modified_base 95: mod_base = OTHER; note = 2'-O-methyl modified nucleotide
  modified_base 96: mod_base = OTHER; note = 2'-O-methyl modified nucleotide
  modified_base 126: mod_base = OTHER; note = Nucleotide with phosphorothioate linkage
  modified_base 127: mod_base = OTHER; note = 2'-O-methyl modified nucleotide with phosphorothioate linkage
  modified_base 128: mod_base = OTHER; note = 2'-O-methyl modified nucleotide with phosphorothioate linkage
  modified_base 129: mod_base = OTHER; note = 2'-O-methyl modified nucleotide
gagtagcgcgagcacagctagttttagagctagaaatagcaagttaaaataaggctagtccgttatcaacttgaaaaagtggcaccgagtcggtgctctcgctccgtggccttagtgatgctgtgctcg

SEQ ID NO: 17816 - RNA, 128 nt, synthetic construct
  source 1..128: mol_type = other RNA
  modified_base 1: mod_base = OTHER; note = 2'-O-methyl modified nucleotide with phosphorothioate linkage
  modified_base 2: mod_base = OTHER; note = 2'-O-methyl modified nucleotide with phosphorothioate linkage
  modified_base 3: mod_base = OTHER; note = 2'-O-methyl modified nucleotide with phosphorothioate linkage
  modified_base 29: mod_base = OTHER; note = 2'-O-methyl modified nucleotide
  modified_base 30: mod_base = OTHER; note = 2'-O-methyl modified nucleotide
  modified_base 31: mod_base = OTHER; note = 2'-O-methyl modified nucleotide
  modified_base 32: mod_base = OTHER; note = 2'-O-methyl modified nucleotide
  modified_base 33: mod_base = OTHER; note = 2'-O-methyl modified nucleotide
  modified_base 34: mod_base = OTHER; note = 2'-O-methyl modified nucleotide
  modified_base 35: mod_base = OTHER; note = 2'-O-methyl modified nucleotide
  modified_base 36: mod_base = OTHER; note = 2'-O-methyl modified nucleotide
  modified_base 37: mod_base = OTHER; note = 2'-O-methyl modified nucleotide
  modified_base 38: mod_base = OTHER; note = 2'-O-methyl modified nucleotide
  modified_base 39: mod_base = OTHER; note = 2'-O-methyl modified nucleotide
  modified_base 40: mod_base = OTHER; note = 2'-O-methyl modified nucleotide
  modified_base 69: mod_base = OTHER; note = 2'-O-methyl modified nucleotide
  modified_base 70: mod_base = OTHER; note = 2'-O-methyl modified nucleotide
  modified_base 71: mod_base = OTHER; note = 2'-O-methyl modified nucleotide
  modified_base 72: mod_base = OTHER; note = 2'-O-methyl modified nucleotide
  modified_base 73: mod_base = OTHER; note = 2'-O-methyl modified nucleotide
  modified_base 74: mod_base = OTHER; note = 2'-O-methyl modified nucleotide
  modified_base 75: mod_base = OTHER; note = 2'-O-methyl modified nucleotide
  modified_base 76: mod_base = OTHER; note = 2'-O-methyl modified nucleotide
  modified_base 77: mod_base = OTHER; note = 2'-O-methyl modified nucleotide
  modified_base 78: mod_base = OTHER; note = 2'-O-methyl modified nucleotide
  modified_base 79: mod_base = OTHER; note = 2'-O-methyl modified nucleotide
  modified_base 80: mod_base = OTHER; note = 2'-O-methyl modified nucleotide
  modified_base 81: mod_base = OTHER; note = 2'-O-methyl modified nucleotide
  modified_base 82: mod_base = OTHER; note = 2'-O-methyl modified nucleotide
  modified_base 83: mod_base = OTHER; note = 2'-O-methyl modified nucleotide
  modified_base 84: mod_base = OTHER; note = 2'-O-methyl modified nucleotide
  modified_base 85: mod_base = OTHER; note = 2'-O-methyl modified nucleotide
  modified_base 86: mod_base = OTHER; note = 2'-O-methyl modified nucleotide
  modified_base 87: mod_base = OTHER; note = 2'-O-methyl modified nucleotide
  modified_base 88: mod_base = OTHER; note = 2'-O-methyl modified nucleotide
  modified_base 89: mod_base = OTHER; note = 2'-O-methyl modified nucleotide
  modified_base 90: mod_base = OTHER; note = 2'-O-methyl modified nucleotide
  modified_base 91: mod_base = OTHER; note = 2'-O-methyl modified nucleotide
  modified_base 92: mod_base = OTHER; note = 2'-O-methyl modified nucleotide
  modified_base 93: mod_base = OTHER; note = 2'-O-methyl modified nucleotide
  modified_base 94: mod_base = OTHER; note = 2'-O-methyl modified nucleotide
  modified_base 95: mod_base = OTHER; note = 2'-O-methyl modified nucleotide
  modified_base 96: mod_base = OTHER; note = 2'-O-methyl modified nucleotide
  modified_base 125: mod_base = OTHER; note = Nucleotide with phosphorothioate linkage
  modified_base 126: mod_base = OTHER; note = 2'-O-methyl modified nucleotide with phosphorothioate linkage
  modified_base 127: mod_base = OTHER; note = 2'-O-methyl modified nucleotide with phosphorothioate linkage
  modified_base 128: mod_base = OTHER; note = 2'-O-methyl modified nucleotide
gagtagcgcgagcacagctagttttagagctagaaatagcaagttaaaataaggctagtccgttatcaacttgaaaaagtggcaccgagtcggtgctctcgctccgtggccttagtgatgctgtgctc

SEQ ID NO: 17817 - RNA, 121 nt, synthetic construct
  source 1..121: mol_type = other RNA
  modified_base 1: mod_base = OTHER; note = 2'-O-methyl modified nucleotide with phosphorothioate linkage
  modified_base 2: mod_base = OTHER; note = 2'-O-methyl modified nucleotide with phosphorothioate linkage
  modified_base 3: mod_base = OTHER; note = 2'-O-methyl modified nucleotide with phosphorothioate linkage
  modified_base 29: mod_base = OTHER; note = 2'-O-methyl modified nucleotide
  modified_base 30: mod_base = OTHER; note = 2'-O-methyl modified nucleotide
  modified_base 31: mod_base = OTHER; note = 2'-O-methyl modified nucleotide
  modified_base 32: mod_base = OTHER; note = 2'-O-methyl modified nucleotide
  modified_base 33: mod_base = OTHER; note = 2'-O-methyl modified nucleotide
  modified_base 34: mod_base = OTHER; note = 2'-O-methyl modified nucleotide
  modified_base 35: mod_base = OTHER; note = 2'-O-methyl modified nucleotide
  modified_base 36: mod_base = OTHER; note = 2'-O-methyl modified nucleotide
  modified_base 37: mod_base = OTHER; note = 2'-O-methyl modified nucleotide
  modified_base 38: mod_base = OTHER; note = 2'-O-methyl modified nucleotide
  modified_base 39: mod_base = OTHER; note = 2'-O-methyl modified nucleotide
  modified_base 40: mod_base = OTHER; note = 2'-O-methyl modified nucleotide
  modified_base 69: mod_base = OTHER; note = 2'-O-methyl modified nucleotide
  modified_base 70: mod_base = OTHER; note = 2'-O-methyl modified nucleotide
  modified_base 71: mod_base = OTHER; note = 2'-O-methyl modified nucleotide
  modified_base 72: mod_base = OTHER; note = 2'-O-methyl modified nucleotide
  modified_base 73: mod_base = OTHER; note = 2'-O-methyl modified nucleotide
  modified_base 74: mod_base = OTHER; note = 2'-O-methyl modified nucleotide
  modified_base 75: mod_base = OTHER; note = 2'-O-methyl modified nucleotide
  modified_base 76: mod_base = OTHER; note = 2'-O-methyl modified nucleotide
  modified_base 77: mod_base = OTHER; note = 2'-O-methyl modified nucleotide
  modified_base 78: mod_base = OTHER; note = 2'-O-methyl modified nucleotide
  modified_base 79: mod_base = OTHER; note = 2'-O-methyl modified nucleotide
  modified_base 80: mod_base = OTHER; note = 2'-O-methyl modified nucleotide
  modified_base 81: mod_base = OTHER; note = 2'-O-methyl modified nucleotide
  modified_base 82: mod_base = OTHER; note = 2'-O-methyl modified nucleotide
  modified_base 83: mod_base = OTHER; note = 2'-O-methyl modified nucleotide
  modified_base 84: mod_base = OTHER; note = 2'-O-methyl modified nucleotide
  modified_base 85: mod_base = OTHER; note = 2'-O-methyl modified nucleotide
  modified_base 86: mod_base = OTHER; note = 2'-O-methyl modified nucleotide
  modified_base 87: mod_base = OTHER; note = 2'-O-methyl modified nucleotide
  modified_base 88: mod_base = OTHER; note = 2'-O-methyl modified nucleotide
  modified_base 89: mod_base = OTHER; note = 2'-O-methyl modified nucleotide
  modified_base 90: mod_base = OTHER; note = 2'-O-methyl modified nucleotide
  modified_base 91: mod_base = OTHER; note = 2'-O-methyl modified nucleotide
  modified_base 92: mod_base = OTHER; note = 2'-O-methyl modified nucleotide
  modified_base 93: mod_base = OTHER; note = 2'-O-methyl modified nucleotide
  modified_base 94: mod_base = OTHER; note = 2'-O-methyl modified nucleotide
  modified_base 95: mod_base = OTHER; note = 2'-O-methyl modified nucleotide
  modified_base 96: mod_base = OTHER; note = 2'-O-methyl modified nucleotide
  modified_base 118: mod_base = OTHER; note = Nucleotide with phosphorothioate linkage
  modified_base 119: mod_base = OTHER; note = 2'-O-methyl modified nucleotide with phosphorothioate linkage
  modified_base 120: mod_base = OTHER; note = 2'-O-methyl modified nucleotide with phosphorothioate linkage
  modified_base 121: mod_base = OTHER; note = 2'-O-methyl modified nucleotide
gagtagcgcgagcacagctagttttagagctagaaatagcaagttaaaataaggctagtccgttatcaacttgaaaaagtggcaccgagtcggtgcgccttagtaaccctgtgctcgcgct

SEQ ID NO: 17818 - RNA, 120 nt, synthetic construct
  source 1..120: mol_type = other RNA
  modified_base 1: mod_base = OTHER; note = 2'-O-methyl modified nucleotide with phosphorothioate linkage
  modified_base 2: mod_base = OTHER; note = 2'-O-methyl modified nucleotide with phosphorothioate linkage
  modified_base 3: mod_base = OTHER; note = 2'-O-methyl modified nucleotide with phosphorothioate linkage
  modified_base 29: mod_base = OTHER; note = 2'-O-methyl modified nucleotide
  modified_base 30: mod_base = OTHER; note = 2'-O-methyl modified nucleotide
  modified_base 31: mod_base = OTHER; note = 2'-O-methyl modified nucleotide
  modified_base 32: mod_base = OTHER; note = 2'-O-methyl modified nucleotide
  modified_base 33: mod_base = OTHER; note = 2'-O-methyl modified nucleotide
  modified_base 34: mod_base = OTHER; note = 2'-O-methyl modified nucleotide
  modified_base 35: mod_base = OTHER; note = 2'-O-methyl modified nucleotide
  modified_base 36: mod_base = OTHER; note = 2'-O-methyl modified nucleotide
  modified_base 37: mod_base = OTHER; note = 2'-O-methyl modified nucleotide
  modified_base 38: mod_base = OTHER; note = 2'-O-methyl modified nucleotide
  modified_base 39: mod_base = OTHER; note = 2'-O-methyl modified nucleotide
  modified_base 40: mod_base = OTHER; note = 2'-O-methyl modified nucleotide
  modified_base 69: mod_base = OTHER; note = 2'-O-methyl modified nucleotide
  modified_base 70: mod_base = OTHER; note = 2'-O-methyl modified nucleotide
  modified_base 71: mod_base = OTHER; note = 2'-O-methyl modified nucleotide
  modified_base 72: mod_base = OTHER; note = 2'-O-methyl modified nucleotide
  modified_base 73: mod_base = OTHER; note = 2'-O-methyl modified nucleotide
  modified_base 74: mod_base = OTHER; note = 2'-O-methyl modified nucleotide
  modified_base 75: mod_base = OTHER; note = 2'-O-methyl modified nucleotide
  modified_base 76: mod_base = OTHER; note = 2'-O-methyl modified nucleotide
  modified_base 77: mod_base = OTHER; note = 2'-O-methyl modified nucleotide
  modified_base 78: mod_base = OTHER; note = 2'-O-methyl modified nucleotide
  modified_base 79: mod_base = OTHER; note = 2'-O-methyl modified nucleotide
  modified_base 80: mod_base = OTHER; note = 2'-O-methyl modified nucleotide
  modified_base 81: mod_base = OTHER; note = 2'-O-methyl modified nucleotide
  modified_base 82: mod_base = OTHER; note = 2'-O-methyl modified nucleotide
  modified_base 83: mod_base = OTHER; note = 2'-O-methyl modified nucleotide
  modified_base 84: mod_base = OTHER; note = 2'-O-methyl modified nucleotide
  modified_base 85: mod_base = OTHER; note = 2'-O-methyl modified nucleotide
  modified_base 86: mod_base = OTHER; note = 2'-O-methyl modified nucleotide
  modified_base 87: mod_base = OTHER; note = 2'-O-methyl modified nucleotide
  modified_base 88: mod_base = OTHER; note = 2'-O-methyl modified nucleotide
  modified_base 89: mod_base = OTHER; note = 2'-O-methyl modified nucleotide
  modified_base 90: mod_base = OTHER; note = 2'-O-methyl modified nucleotide
  modified_base 91: mod_base = OTHER; note = 2'-O-methyl modified nucleotide
  modified_base 92: mod_base = OTHER; note = 2'-O-methyl modified nucleotide
  modified_base 93: mod_base = OTHER; note = 2'-O-methyl modified nucleotide
  modified_base 94: mod_base = OTHER; note = 2'-O-methyl modified nucleotide
  modified_base 95: mod_base = OTHER; note = 2'-O-methyl modified nucleotide
  modified_base 96: mod_base = OTHER; note = 2'-O-methyl modified nucleotide
  modified_base 117: mod_base = OTHER; note = Nucleotide with phosphorothioate linkage
  modified_base 118: mod_base = OTHER; note = 2'-O-methyl modified nucleotide with phosphorothioate linkage
  modified_base 119: mod_base = OTHER; note = 2'-O-methyl modified nucleotide with phosphorothioate linkage
  modified_base 120: mod_base = OTHER; note = 2'-O-methyl modified nucleotide
gagtagcgcgagcacagctagttttagagctagaaatagcaagttaaaataaggctagtccgttatcaacttgaaaaagtggcaccgagtcggtgcgccttagtaaccctgtgctcgcgc

SEQ ID NO: 17819 - RNA, 119 nt, synthetic construct
  source 1..119: mol_type = other RNA
  modified_base 1: mod_base = OTHER; note = 2'-O-methyl modified nucleotide with phosphorothioate linkage
  modified_base 2: mod_base = OTHER; note = 2'-O-methyl modified nucleotide with phosphorothioate linkage
  modified_base 3: mod_base = OTHER; note = 2'-O-methyl modified nucleotide with phosphorothioate linkage
  modified_base 29: mod_base = OTHER; note = 2'-O-methyl modified nucleotide
  modified_base 30: mod_base = OTHER; note = 2'-O-methyl modified nucleotide
  modified_base 31: mod_base = OTHER; note = 2'-O-methyl modified nucleotide
  modified_base 32: mod_base = OTHER; note = 2'-O-methyl modified nucleotide
  modified_base 33: mod_base = OTHER; note = 2'-O-methyl modified nucleotide
  modified_base 34: mod_base = OTHER; note = 2'-O-methyl modified nucleotide
  modified_base 35: mod_base = OTHER; note = 2'-O-methyl modified nucleotide
  modified_base 36: mod_base = OTHER; note = 2'-O-methyl modified nucleotide
  modified_base 37: mod_base = OTHER; note = 2'-O-methyl modified nucleotide
  modified_base 38: mod_base = OTHER; note = 2'-O-methyl modified nucleotide
  modified_base 39: mod_base = OTHER; note = 2'-O-methyl modified nucleotide
  modified_base 40: mod_base = OTHER; note = 2'-O-methyl modified nucleotide
  modified_base 69: mod_base = OTHER; note = 2'-O-methyl modified nucleotide
  modified_base 70: mod_base = OTHER; note = 2'-O-methyl modified nucleotide
  modified_base 71: mod_base = OTHER; note = 2'-O-methyl modified nucleotide
  modified_base 72: mod_base = OTHER; note = 2'-O-methyl modified nucleotide
  modified_base 73: mod_base = OTHER; note = 2'-O-methyl modified nucleotide
  modified_base 74: mod_base = OTHER; note = 2'-O-methyl modified nucleotide
  modified_base 75: mod_base = OTHER; note = 2'-O-methyl modified nucleotide
  modified_base 76: mod_base = OTHER; note = 2'-O-methyl modified nucleotide
  modified_base 77: mod_base = OTHER; note = 2'-O-methyl modified nucleotide
  modified_base 78: mod_base = OTHER; note = 2'-O-methyl modified nucleotide
  modified_base 79: mod_base = OTHER; note = 2'-O-methyl modified nucleotide
  modified_base 80: mod_base = OTHER; note = 2'-O-methyl modified nucleotide
  modified_base 81: mod_base = OTHER; note = 2'-O-methyl modified nucleotide
  modified_base 82: mod_base = OTHER; note = 2'-O-methyl modified nucleotide
  modified_base 83: mod_base = OTHER; note = 2'-O-methyl modified nucleotide
  modified_base 84: mod_base = OTHER; note = 2'-O-methyl modified nucleotide
  modified_base 85: mod_base = OTHER; note = 2'-O-methyl modified nucleotide
  modified_base 86: mod_base = OTHER; note = 2'-O-methyl modified nucleotide
  modified_base 87: mod_base = OTHER; note = 2'-O-methyl modified nucleotide
  modified_base 88: mod_base = OTHER; note = 2'-O-methyl modified nucleotide
  modified_base 89: mod_base = OTHER; note = 2'-O-methyl modified nucleotide
  modified_base 90: mod_base = OTHER; note = 2'-O-methyl modified nucleotide
  modified_base 91: mod_base = OTHER; note = 2'-O-methyl modified nucleotide
  modified_base 92: mod_base = OTHER; note = 2'-O-methyl modified nucleotide
  modified_base 93: mod_base = OTHER; note = 2'-O-methyl modified nucleotide
  modified_base 94: mod_base = OTHER; note = 2'-O-methyl modified nucleotide
  modified_base 95: mod_base = OTHER; note = 2'-O-methyl modified nucleotide
  modified_base 96: mod_base = OTHER; note = 2'-O-methyl modified nucleotide
  modified_base 116: mod_base = OTHER; note = Nucleotide with phosphorothioate linkage
  modified_base 117: mod_base = OTHER; note = 2'-O-methyl modified nucleotide with phosphorothioate linkage
  modified_base 118: mod_base = OTHER; note = 2'-O-methyl modified nucleotide with phosphorothioate linkage
  modified_base 119: mod_base = OTHER; note = 2'-O-methyl modified nucleotide
gagtagcgcgagcacagctagttttagagctagaaatagcaagttaaaataaggctagtccgttatcaacttgaaaaagtggcaccgagtcggtgcgccttagtaaccctgtgctcgcg

SEQ ID NO: 17820 - RNA, 118 nt, synthetic construct
  source 1..118: mol_type = other RNA
  modified_base 1: mod_base = OTHER; note = 2'-O-methyl modified nucleotide with phosphorothioate linkage
  modified_base 2: mod_base = OTHER; note = 2'-O-methyl modified nucleotide with phosphorothioate linkage
  modified_base 3: mod_base = OTHER; note = 2'-O-methyl modified nucleotide with phosphorothioate linkage
  modified_base 29: mod_base = OTHER; note = 2'-O-methyl modified nucleotide
  modified_base 30: mod_base = OTHER; note = 2'-O-methyl modified nucleotide
  modified_base 31: mod_base = OTHER; note = 2'-O-methyl modified nucleotide
  modified_base 32: mod_base = OTHER; note = 2'-O-methyl modified nucleotide
  modified_base 33: mod_base = OTHER; note = 2'-O-methyl modified nucleotide
  modified_base 34: mod_base = OTHER; note = 2'-O-methyl modified nucleotide
  modified_base 35: mod_base = OTHER; note = 2'-O-methyl modified nucleotide
  modified_base 36: mod_base = OTHER; note = 2'-O-methyl modified nucleotide
  modified_base 37: mod_base = OTHER; note = 2'-O-methyl modified nucleotide
  modified_base 38: mod_base = OTHER; note = 2'-O-methyl modified nucleotide
  modified_base 39: mod_base = OTHER; note = 2'-O-methyl modified nucleotide
  modified_base 40: mod_base = OTHER; note = 2'-O-methyl modified nucleotide
  modified_base 69: mod_base = OTHER; note = 2'-O-methyl modified nucleotide
  modified_base 70: mod_base = OTHER; note = 2'-O-methyl modified nucleotide
  modified_base 71: mod_base = OTHER; note = 2'-O-methyl modified nucleotide
  modified_base 72: mod_base = OTHER; note = 2'-O-methyl modified nucleotide
  modified_base 73: mod_base = OTHER; note = 2'-O-methyl modified nucleotide
  modified_base 74: mod_base = OTHER; note = 2'-O-methyl modified nucleotide
  modified_base 75: mod_base = OTHER; note = 2'-O-methyl modified nucleotide
  modified_base 76: mod_base = OTHER; note = 2'-O-methyl modified nucleotide
  modified_base 77: mod_base = OTHER; note = 2'-O-methyl modified nucleotide
  modified_base 78: mod_base = OTHER; note = 2'-O-methyl modified nucleotide
  modified_base 79: mod_base = OTHER; note = 2'-O-methyl modified nucleotide
  modified_base 80: mod_base = OTHER; note = 2'-O-methyl modified nucleotide
  modified_base 81: mod_base = OTHER; note = 2'-O-methyl modified nucleotide
  modified_base 82: mod_base = OTHER; note = 2'-O-methyl modified nucleotide
  modified_base 83: mod_base = OTHER; note = 2'-O-methyl modified nucleotide
  modified_base 84: mod_base = OTHER; note = 2'-O-methyl modified nucleotide
  modified_base 85: mod_base = OTHER; note = 2'-O-methyl modified nucleotide
  modified_base 86: mod_base = OTHER; note = 2'-O-methyl modified nucleotide
  modified_base 87: mod_base = OTHER; note = 2'-O-methyl modified nucleotide
  modified_base 88: mod_base = OTHER; note = 2'-O-methyl modified nucleotide
  modified_base 89: mod_base = OTHER; note = 2'-O-methyl modified nucleotide
  modified_base 90: mod_base = OTHER; note = 2'-O-methyl modified nucleotide
  modified_base 91: mod_base = OTHER; note = 2'-O-methyl modified nucleotide
  modified_base 92: mod_base = OTHER; note = 2'-O-methyl modified nucleotide
  modified_base 93: mod_base = OTHER; note = 2'-O-methyl modified nucleotide
  modified_base 94: mod_base = OTHER; note = 2'-O-methyl modified nucleotide
  modified_base 95: mod_base = OTHER; note = 2'-O-methyl modified nucleotide
  modified_base 96: mod_base = OTHER; note = 2'-O-methyl modified nucleotide
  modified_base 115: mod_base = OTHER; note = Nucleotide with phosphorothioate linkage
  modified_base 116: mod_base = OTHER; note = 2'-O-methyl modified nucleotide with phosphorothioate linkage
  modified_base 117: mod_base = OTHER; note = 2'-O-methyl modified nucleotide with phosphorothioate linkage
  modified_base 118: mod_base = OTHER; note = 2'-O-methyl modified nucleotide
gagtagcgcgagcacagctagttttagagctagaaatagcaagttaaaataaggctagtccgttatcaacttgaaaaagtggcaccgagtcggtgcgccttagtaaccctgtgctcgc

SEQ ID NO: 17821 - RNA, 117 nt, synthetic construct
  source 1..117: mol_type = other RNA
  modified_base 1: mod_base = OTHER; note = 2'-O-methyl modified nucleotide with phosphorothioate linkage
  modified_base 2: mod_base = OTHER; note = 2'-O-methyl modified nucleotide with phosphorothioate linkage
  modified_base 3: mod_base = OTHER; note = 2'-O-methyl modified nucleotide with phosphorothioate linkage
  modified_base 29: mod_base = OTHER; note = 2'-O-methyl modified nucleotide
  modified_base 30: mod_base = OTHER; note = 2'-O-methyl modified nucleotide
  modified_base 31: mod_base = OTHER; note = 2'-O-methyl modified nucleotide
  modified_base 32: mod_base = OTHER; note = 2'-O-methyl modified nucleotide
  modified_base 33: mod_base = OTHER; note = 2'-O-methyl modified nucleotide
  modified_base 34: mod_base = OTHER; note = 2'-O-methyl modified nucleotide
  modified_base 35: mod_base = OTHER; note = 2'-O-methyl modified nucleotide
  modified_base 36: mod_base = OTHER; note = 2'-O-methyl modified nucleotide
  modified_base 37: mod_base = OTHER; note = 2'-O-methyl modified nucleotide
  modified_base 38: mod_base = OTHER; note = 2'-O-methyl modified nucleotide
  modified_base 39: mod_base = OTHER; note = 2'-O-methyl modified nucleotide
  modified_base 40: mod_base = OTHER; note = 2'-O-methyl modified nucleotide
  modified_base 69: mod_base = OTHER; note = 2'-O-methyl modified nucleotide
  modified_base 70: mod_base = OTHER; note = 2'-O-methyl modified nucleotide
  modified_base 71: mod_base = OTHER; note = 2'-O-methyl modified nucleotide
  modified_base 72: mod_base = OTHER; note = 2'-O-methyl modified nucleotide
  modified_base 73: mod_base = OTHER; note = 2'-O-methyl modified nucleotide
  modified_base 74: mod_base = OTHER; note = 2'-O-methyl modified nucleotide
  modified_base 75: mod_base = OTHER; note = 2'-O-methyl modified nucleotide
  modified_base 76: mod_base = OTHER; note = 2'-O-methyl modified nucleotide
  modified_base 77: mod_base = OTHER; note = 2'-O-methyl modified nucleotide
  modified_base 78: mod_base = OTHER; note = 2'-O-methyl modified nucleotide
  modified_base 79: mod_base = OTHER; note = 2'-O-methyl modified nucleotide
  modified_base 80: mod_base = OTHER; note = 2'-O-methyl modified nucleotide
  modified_base 81: mod_base = OTHER; note = 2'-O-methyl modified nucleotide
  modified_base 82: mod_base = OTHER; note = 2'-O-methyl modified nucleotide
  modified_base 83: mod_base = OTHER; note = 2'-O-methyl modified nucleotide
  modified_base 84: mod_base = OTHER; note = 2'-O-methyl modified nucleotide
  modified_base 85: mod_base = OTHER; note = 2'-O-methyl modified nucleotide
  modified_base 86: mod_base = OTHER; note = 2'-O-methyl modified nucleotide
  modified_base 87: mod_base = OTHER; note = 2'-O-methyl modified nucleotide
  modified_base 88: mod_base = OTHER; note = 2'-O-methyl modified nucleotide
  modified_base 89: mod_base = OTHER; note = 2'-O-methyl modified nucleotide
  modified_base 90: mod_base = OTHER; note = 2'-O-methyl modified nucleotide
  modified_base 91: mod_base = OTHER; note = 2'-O-methyl modified nucleotide
  modified_base 92: mod_base = OTHER; note = 2'-O-methyl modified nucleotide
  modified_base 93: mod_base = OTHER; note = 2'-O-methyl modified nucleotide
  modified_base 94: mod_base = OTHER; note = 2'-O-methyl modified nucleotide
  modified_base 95: mod_base = OTHER; note = 2'-O-methyl modified nucleotide
  modified_base 96: mod_base = OTHER; note = 2'-O-methyl modified nucleotide
  modified_base 114: mod_base = OTHER; note = Nucleotide with phosphorothioate linkage
  modified_base 115: mod_base = OTHER; note = 2'-O-methyl modified nucleotide with phosphorothioate linkage
  modified_base 116: mod_base = OTHER; note = 2'-O-methyl modified nucleotide with phosphorothioate linkage
  modified_base 117: mod_base = OTHER; note = 2'-O-methyl modified nucleotide
gagtagcgcgagcacagctagttttagagctagaaatagcaagttaaaataaggctagtccgttatcaacttgaaaaagtggcaccgagtcggtgcgccttagtaaccctgtgctcg

SEQ ID NO: 17822 - RNA, 116 nt, synthetic construct
  source 1..116: mol_type = other RNA
  modified_base 1: mod_base = OTHER; note = 2'-O-methyl modified nucleotide with phosphorothioate linkage
  modified_base 2: mod_base = OTHER; note = 2'-O-methyl modified nucleotide with phosphorothioate linkage
  modified_base 3: mod_base = OTHER; note = 2'-O-methyl modified nucleotide with phosphorothioate linkage
  modified_base 29: mod_base = OTHER; note = 2'-O-methyl modified nucleotide
  modified_base 30: mod_base = OTHER; note = 2'-O-methyl modified nucleotide
  modified_base 31: mod_base = OTHER; note = 2'-O-methyl modified nucleotide
  modified_base 32: mod_base = OTHER; note = 2'-O-methyl modified nucleotide
  modified_base 33: mod_base = OTHER; note = 2'-O-methyl modified nucleotide
  modified_base 34: mod_base = OTHER; note = 2'-O-methyl modified nucleotide
  modified_base 35: mod_base = OTHER; note = 2'-O-methyl modified nucleotide
  modified_base 36: mod_base = OTHER; note = 2'-O-methyl modified nucleotide
  modified_base 37: mod_base = OTHER; note = 2'-O-methyl modified nucleotide
  modified_base 38: mod_base = OTHER; note = 2'-O-methyl modified nucleotide
  modified_base 39: mod_base = OTHER; note = 2'-O-methyl modified nucleotide
  modified_base 40: mod_base = OTHER; note = 2'-O-methyl modified nucleotide
  modified_base 69: mod_base = OTHER; note = 2'-O-methyl modified nucleotide
  modified_base 70: mod_base = OTHER; note = 2'-O-methyl modified nucleotide
  modified_base 71: mod_base = OTHER; note = 2'-O-methyl modified nucleotide
  modified_base 72: mod_base = OTHER; note = 2'-O-methyl modified nucleotide
  modified_base 73: mod_base = OTHER; note = 2'-O-methyl modified nucleotide
  modified_base 74: mod_base = OTHER; note = 2'-O-methyl modified nucleotide
  modified_base 75: mod_base = OTHER; note = 2'-O-methyl modified nucleotide
  modified_base 76: mod_base = OTHER; note = 2'-O-methyl modified nucleotide
  modified_base 77: mod_base = OTHER; note = 2'-O-methyl modified nucleotide
  modified_base 78: mod_base = OTHER; note = 2'-O-methyl modified nucleotide
  modified_base 79: mod_base = OTHER; note = 2'-O-methyl modified nucleotide
  modified_base 80: mod_base = OTHER; note = 2'-O-methyl modified nucleotide
  modified_base 81: mod_base = OTHER; note = 2'-O-methyl modified nucleotide
  modified_base 82: mod_base = OTHER; note = 2'-O-methyl modified nucleotide
  modified_base 83: mod_base = OTHER; note = 2'-O-methyl modified nucleotide
  modified_base 84: mod_base = OTHER; note = 2'-O-methyl modified nucleotide
  modified_base 85: mod_base = OTHER; note = 2'-O-methyl modified nucleotide
  modified_base 86: mod_base = OTHER; note = 2'-O-methyl modified nucleotide
  modified_base 87: mod_base = OTHER; note = 2'-O-methyl modified nucleotide
  modified_base 88: mod_base = OTHER; note = 2'-O-methyl modified nucleotide
  modified_base 89: mod_base = OTHER; note = 2'-O-methyl modified nucleotide
  modified_base 90: mod_base = OTHER; note = 2'-O-methyl modified nucleotide
  modified_base 91: mod_base = OTHER; note = 2'-O-methyl modified nucleotide
  modified_base 92: mod_base = OTHER; note = 2'-O-methyl modified nucleotide
  modified_base 93: mod_base = OTHER; note = 2'-O-methyl modified nucleotide
  modified_base 94: mod_base = OTHER; note = 2'-O-methyl modified nucleotide
  modified_base 95: mod_base = OTHER; note = 2'-O-methyl modified nucleotide
  modified_base 96: mod_base = OTHER; note = 2'-O-methyl modified nucleotide
  modified_base 113: mod_base = OTHER; note = Nucleotide with phosphorothioate linkage
  modified_base 114: mod_base = OTHER; note = 2'-O-methyl modified nucleotide with phosphorothioate linkage
  modified_base 115: mod_base = OTHER; note = 2'-O-methyl modified nucleotide with phosphorothioate linkage
  modified_base 116: mod_base = OTHER; note = 2'-O-methyl modified nucleotide
gagtagcgcgagcacagctagttttagagctagaaatagcaagttaaaataaggctagtccgttatcaacttgaaaaagtggcaccgagtcggtgcgccttagtaaccctgtgctc

SEQ ID NO: 17823 - RNA, 123 nt, synthetic construct
  source 1..123: mol_type = other RNA
  modified_base 1: mod_base = OTHER; note = 2'-O-methyl modified nucleotide with phosphorothioate linkage
  modified_base 2: mod_base = OTHER; note = 2'-O-methyl modified nucleotide with phosphorothioate linkage
  modified_base 3: mod_base = OTHER; note = 2'-O-methyl modified nucleotide with phosphorothioate linkage
  modified_base 29: mod_base = OTHER; note = 2'-O-methyl modified nucleotide
  modified_base 30: mod_base = OTHER; note = 2'-O-methyl modified nucleotide
  modified_base 31: mod_base = OTHER; note = 2'-O-methyl modified nucleotide
  modified_base 32: mod_base = OTHER; note = 2'-O-methyl modified nucleotide
  modified_base 33: mod_base = OTHER; note = 2'-O-methyl modified nucleotide
  modified_base 34: mod_base = OTHER; note = 2'-O-methyl modified nucleotide
  modified_base 35: mod_base = OTHER; note = 2'-O-methyl modified nucleotide
  modified_base 36: mod_base = OTHER; note = 2'-O-methyl modified nucleotide
  modified_base 37: mod_base = OTHER; note = 2'-O-methyl modified nucleotide
  modified_base 38: mod_base = OTHER; note = 2'-O-methyl modified nucleotide
  modified_base 39: mod_base = OTHER; note = 2'-O-methyl modified nucleotide
  modified_base 40: mod_base = OTHER; note = 2'-O-methyl modified nucleotide
  modified_base 69: mod_base = OTHER; note = 2'-O-methyl modified nucleotide
  modified_base 70: mod_base = OTHER; note = 2'-O-methyl modified nucleotide
  modified_base 71: mod_base = OTHER; note = 2'-O-methyl modified nucleotide
  modified_base 72: mod_base = OTHER; note = 2'-O-methyl modified nucleotide
  modified_base 73: mod_base = OTHER; note = 2'-O-methyl modified nucleotide
  modified_base 74: mod_base = OTHER; note = 2'-O-methyl modified nucleotide
  modified_base 75: mod_base = OTHER; note = 2'-O-methyl modified nucleotide
  modified_base 76: mod_base = OTHER; note = 2'-O-methyl modified nucleotide
  modified_base 77: mod_base = OTHER; note = 2'-O-methyl modified nucleotide
  modified_base 78: mod_base = OTHER; note = 2'-O-methyl modified nucleotide
  modified_base 79: mod_base = OTHER; note = 2'-O-methyl modified nucleotide
  modified_base 80: mod_base = OTHER; note = 2'-O-methyl modified nucleotide
  modified_base 81: mod_base = OTHER; note = 2'-O-methyl modified nucleotide
  modified_base 82: mod_base = OTHER; note = 2'-O-methyl modified nucleotide
  modified_base 83: mod_base = OTHER; note = 2'-O-methyl modified nucleotide
  modified_base 84: mod_base = OTHER; note = 2'-O-methyl modified nucleotide
  modified_base 85: mod_base = OTHER; note = 2'-O-methyl modified nucleotide
  modified_base 86: mod_base = OTHER; note = 2'-O-methyl modified nucleotide
  modified_base 87: mod_base = OTHER; note = 2'-O-methyl modified nucleotide
  modified_base 88: mod_base = OTHER; note = 2'-O-methyl modified nucleotide
  modified_base 89: mod_base = OTHER; note = 2'-O-methyl modified nucleotide
  modified_base 90: mod_base = OTHER; note = 2'-O-methyl modified nucleotide
  modified_base 91: mod_base = OTHER; note = 2'-O-methyl modified nucleotide
  modified_base 92: mod_base = OTHER; note = 2'-O-methyl modified nucleotide
  modified_base 93: mod_base = OTHER; note = 2'-O-methyl modified nucleotide
  modified_base 94: mod_base = OTHER; note = 2'-O-methyl modified nucleotide
  modified_base 95: mod_base = OTHER; note = 2'-O-methyl modified nucleotide
  modified_base 96: mod_base = OTHER; note = 2'-O-methyl modified nucleotide
  modified_base 120: mod_base = OTHER; note = Nucleotide with phosphorothioate linkage
  modified_base 121: mod_base = OTHER; note = 2'-O-methyl modified nucleotide with phosphorothioate linkage
  modified_base 122: mod_base = OTHER; note = 2'-O-methyl modified nucleotide with phosphorothioate linkage
  modified_base 123: mod_base = OTHER; note = 2'-O-methyl modified nucleotide
gagtagcgcgagcacagctagttttagagctagaaatagcaagttaaaataaggctagtccgttatcaacttgaaaaagtggcaccgagtcggtgctggccttagtaaccctgtgctcgcgct

SEQ ID NO: 17824 - RNA, 122 nt, synthetic construct
  source 1..122: mol_type = other RNA
  modified_base 1: mod_base = OTHER; note = 2'-O-methyl modified nucleotide with phosphorothioate linkage
  modified_base 2: mod_base = OTHER; note = 2'-O-methyl modified nucleotide with phosphorothioate linkage
  modified_base 3: mod_base = OTHER; note = 2'-O-methyl modified nucleotide with phosphorothioate linkage
  modified_base 29: mod_base = OTHER; note = 2'-O-methyl modified nucleotide
  modified_base 30: mod_base = OTHER; note = 2'-O-methyl modified nucleotide
  modified_base 31: mod_base = OTHER; note = 2'-O-methyl modified nucleotide
  modified_base 32: mod_base = OTHER; note = 2'-O-methyl modified nucleotide
  modified_base 33: mod_base = OTHER; note = 2'-O-methyl modified nucleotide
  modified_base 34: mod_base = OTHER; note = 2'-O-methyl modified nucleotide
  modified_base 35: mod_base = OTHER; note = 2'-O-methyl modified nucleotide
  modified_base 36: mod_base = OTHER; note = 2'-O-methyl modified nucleotide
  modified_base 37: mod_base = OTHER; note = 2'-O-methyl modified nucleotide
  modified_base 38: mod_base = OTHER; note = 2'-O-methyl modified nucleotide
  modified_base 39: mod_base = OTHER; note = 2'-O-methyl modified nucleotide
  modified_base 40: mod_base = OTHER; note = 2'-O-methyl modified nucleotide
  modified_base 69: mod_base = OTHER; note = 2'-O-methyl modified nucleotide
  modified_base 70: mod_base = OTHER; note = 2'-O-methyl modified nucleotide
  modified_base 71: mod_base = OTHER; note = 2'-O-methyl modified nucleotide
  modified_base 72: mod_base = OTHER; note = 2'-O-methyl modified nucleotide
  modified_base 73: mod_base = OTHER; note = 2'-O-methyl modified nucleotide
  modified_base 74: mod_base = OTHER; note = 2'-O-methyl modified nucleotide
  modified_base 75: mod_base = OTHER; note = 2'-O-methyl modified nucleotide
  modified_base 76: mod_base = OTHER; note = 2'-O-methyl modified nucleotide
  modified_base 77: mod_base = OTHER; note = 2'-O-methyl modified nucleotide
  modified_base 78: mod_base = OTHER; note = 2'-O-methyl modified nucleotide
  modified_base 79: mod_base = OTHER; note = 2'-O-methyl modified nucleotide
  modified_base 80: mod_base = OTHER; note = 2'-O-methyl modified nucleotide
  modified_base 81: mod_base = OTHER; note = 2'-O-methyl modified nucleotide
  modified_base 82: mod_base = OTHER; note = 2'-O-methyl modified nucleotide
  modified_base 83: mod_base = OTHER; note = 2'-O-methyl modified nucleotide
  modified_base 84: mod_base = OTHER; note = 2'-O-methyl modified nucleotide
  modified_base 85: mod_base = OTHER; note = 2'-O-methyl modified nucleotide
  modified_base 86: mod_base = OTHER; note = 2'-O-methyl modified nucleotide
  modified_base 87: mod_base = OTHER; note = 2'-O-methyl modified nucleotide
  modified_base 88: mod_base = OTHER; note = 2'-O-methyl modified nucleotide
  modified_base 89: mod_base = OTHER; note = 2'-O-methyl modified nucleotide
  modified_base 90: mod_base = OTHER; note = 2'-O-methyl modified nucleotide
  modified_base 91: mod_base = OTHER; note = 2'-O-methyl modified nucleotide
  modified_base 92: mod_base = OTHER; note = 2'-O-methyl modified nucleotide
  modified_base 93: mod_base = OTHER; note = 2'-O-methyl modified nucleotide
  modified_base 94: mod_base = OTHER; note = 2'-O-methyl modified nucleotide
  modified_base 95: mod_base = OTHER; note = 2'-O-methyl modified nucleotide
  modified_base 96: mod_base = OTHER; note = 2'-O-methyl modified nucleotide
  modified_base 119: mod_base = OTHER; note = Nucleotide with phosphorothioate linkage
  modified_base 120: mod_base = OTHER; note = 2'-O-methyl modified nucleotide with phosphorothioate linkage
  modified_base 121: mod_base = OTHER; note = 2'-O-methyl modified nucleotide with phosphorothioate linkage
  modified_base 122: mod_base = OTHER; note = 2'-O-methyl modified nucleotide
gagtagcgcgagcacagctagttttagagctagaaatagcaagttaaaataaggctagtccgttatcaacttgaaaaagtggcaccgagtcggtgctggccttagtaaccctgtgctcgcgc

SEQ ID NO: 17825 - RNA, 121 nt, synthetic construct
  source 1..121: mol_type = other RNA
  modified_base 1: mod_base = OTHER; note = 2'-O-methyl modified nucleotide with phosphorothioate linkage
  modified_base 2: mod_base = OTHER; note = 2'-O-methyl modified nucleotide with phosphorothioate linkage
  modified_base 3: mod_base = OTHER; note = 2'-O-methyl modified nucleotide with phosphorothioate linkage
  modified_base 29: mod_base = OTHER; note = 2'-O-methyl modified nucleotide
  modified_base 30: mod_base = OTHER; note = 2'-O-methyl modified nucleotide
  modified_base 31: mod_base = OTHER; note = 2'-O-methyl modified nucleotide
  modified_base 32: mod_base = OTHER; note = 2'-O-methyl modified nucleotide
  modified_base 33: mod_base = OTHER; note = 2'-O-methyl modified nucleotide
  modified_base 34: mod_base = OTHER; note = 2'-O-methyl modified nucleotide
  modified_base 35: mod_base = OTHER; note = 2'-O-methyl modified nucleotide
  modified_base 36: mod_base = OTHER; note = 2'-O-methyl modified nucleotide
  modified_base 37: mod_base = OTHER; note = 2'-O-methyl modified nucleotide
  modified_base 38: mod_base = OTHER; note = 2'-O-methyl modified nucleotide
  modified_base 39: mod_base = OTHER; note = 2'-O-methyl modified nucleotide
  modified_base 40: mod_base = OTHER; note = 2'-O-methyl modified nucleotide
  modified_base 69: mod_base = OTHER; note = 2'-O-methyl modified nucleotide
  modified_base 70: mod_base = OTHER; note = 2'-O-methyl modified nucleotide
  modified_base 71: mod_base = OTHER; note = 2'-O-methyl modified nucleotide
  modified_base 72: mod_base = OTHER; note = 2'-O-methyl modified nucleotide
  modified_base 73: mod_base = OTHER; note = 2'-O-methyl modified nucleotide
  modified_base 74: mod_base = OTHER; note = 2'-O-methyl modified nucleotide
  modified_base 75: mod_base = OTHER; note = 2'-O-methyl modified nucleotide
  modified_base 76: mod_base = OTHER; note = 2'-O-methyl modified nucleotide
  modified_base 77: mod_base = OTHER; note = 2'-O-methyl modified nucleotide
  modified_base 78: mod_base = OTHER; note = 2'-O-methyl modified nucleotide
  modified_base 79: mod_base = OTHER; note = 2'-O-methyl modified nucleotide
  modified_base 80: mod_base = OTHER; note = 2'-O-methyl modified nucleotide
  modified_base 81: mod_base = OTHER; note = 2'-O-methyl modified nucleotide
  modified_base 82: mod_base = OTHER; note = 2'-O-methyl modified nucleotide
  modified_base 83: mod_base = OTHER; note = 2'-O-methyl modified nucleotide
  modified_base 84: mod_base = OTHER; note = 2'-O-methyl modified nucleotide
  modified_base 85: mod_base = OTHER; note = 2'-O-methyl modified nucleotide
  modified_base 86: mod_base = OTHER; note = 2'-O-methyl modified nucleotide
  modified_base 87: mod_base = OTHER; note = 2'-O-methyl modified nucleotide
  modified_base 88: mod_base = OTHER; note = 2'-O-methyl modified nucleotide
  modified_base 89: mod_base = OTHER; note = 2'-O-methyl modified nucleotide
  modified_base 90: mod_base = OTHER; note = 2'-O-methyl modified nucleotide
  modified_base 91: mod_base = OTHER; note = 2'-O-methyl modified nucleotide
  modified_base 92: mod_base = OTHER; note = 2'-O-methyl modified nucleotide
  modified_base 93: mod_base = OTHER; note = 2'-O-methyl modified nucleotide
  modified_base 94: mod_base = OTHER; note = 2'-O-methyl modified nucleotide
  modified_base 95: mod_base = OTHER; note = 2'-O-methyl modified nucleotide
  modified_base 96: mod_base = OTHER; note = 2'-O-methyl modified nucleotide
  modified_base 118: mod_base = OTHER; note = Nucleotide with phosphorothioate linkage
  modified_base 119: mod_base = OTHER; note = 2'-O-methyl modified nucleotide with phosphorothioate linkage
  modified_base 120: mod_base = OTHER; note = 2'-O-methyl modified nucleotide with phosphorothioate linkage
  modified_base 121: mod_base = OTHER; note = 2'-O-methyl modified nucleotide
gagtagcgcgagcacagctagttttagagctagaaatagcaagttaaaataaggctagtccgttatcaacttgaaaaagtggcaccgagtcggtgctggccttagtaaccctgtgctcgcg

SEQ ID NO: 17826 - RNA, 120 nt, synthetic construct
  source 1..120: mol_type = other RNA
  modified_base 1: mod_base = OTHER; note = 2'-O-methyl modified nucleotide with phosphorothioate linkage
  modified_base 2: mod_base = OTHER; note = 2'-O-methyl modified nucleotide with phosphorothioate linkage
  modified_base 3: mod_base = OTHER; note = 2'-O-methyl modified nucleotide with phosphorothioate linkage
  modified_base 29: mod_base = OTHER; note = 2'-O-methyl modified nucleotide
  modified_base 30: mod_base = OTHER; note = 2'-O-methyl modified nucleotide
  modified_base 31: mod_base = OTHER; note = 2'-O-methyl modified nucleotide
  modified_base 32: mod_base = OTHER; note = 2'-O-methyl modified nucleotide
  modified_base 33: mod_base = OTHER; note = 2'-O-methyl modified nucleotide
  modified_base 34: mod_base = OTHER; note = 2'-O-methyl modified nucleotide
  modified_base 35: mod_base = OTHER; note = 2'-O-methyl modified nucleotide
  modified_base 36: mod_base = OTHER; note = 2'-O-methyl modified nucleotide
  modified_base 37: mod_base = OTHER; note = 2'-O-methyl modified nucleotide
  modified_base 38: mod_base = OTHER; note = 2'-O-methyl modified nucleotide
  modified_base 39: mod_base = OTHER; note = 2'-O-methyl modified nucleotide
  modified_base 40: mod_base = OTHER; note = 2'-O-methyl modified nucleotide
  modified_base 69: mod_base = OTHER; note = 2'-O-methyl modified nucleotide
  modified_base 70: mod_base = OTHER; note = 2'-O-methyl modified nucleotide
  modified_base 71: mod_base = OTHER; note = 2'-O-methyl modified nucleotide
  modified_base 72: mod_base = OTHER; note = 2'-O-methyl modified nucleotide
  modified_base 73: mod_base = OTHER; note = 2'-O-methyl modified nucleotide
  modified_base 74: mod_base = OTHER; note = 2'-O-methyl modified nucleotide
  modified_base 75: mod_base = OTHER; note = 2'-O-methyl modified nucleotide
  modified_base 76: mod_base = OTHER; note = 2'-O-methyl modified nucleotide
  modified_base 77: mod_base = OTHER; note = 2'-O-methyl modified nucleotide
  modified_base 78: mod_base = OTHER; note = 2'-O-methyl modified nucleotide
  modified_base 79: mod_base = OTHER; note = 2'-O-methyl modified nucleotide
  modified_base 80: mod_base = OTHER; note = 2'-O-methyl modified nucleotide
  modified_base 81: mod_base = OTHER; note = 2'-O-methyl modified nucleotide
  modified_base 82: mod_base = OTHER; note = 2'-O-methyl modified nucleotide
  modified_base 83: mod_base = OTHER; note = 2'-O-methyl modified nucleotide
  modified_base 84: mod_base = OTHER; note = 2'-O-methyl modified nucleotide
  modified_base 85: mod_base = OTHER; note = 2'-O-methyl modified nucleotide
  modified_base 86: mod_base = OTHER; note = 2'-O-methyl modified nucleotide
  modified_base 87: mod_base = OTHER; note = 2'-O-methyl modified nucleotide
  modified_base 88: mod_base = OTHER; note = 2'-O-methyl modified nucleotide
  modified_base 89: mod_base = OTHER; note = 2'-O-methyl modified nucleotide
  modified_base 90: mod_base = OTHER; note = 2'-O-methyl modified nucleotide
  modified_base 91: mod_base = OTHER; note = 2'-O-methyl modified nucleotide
  modified_base 92: mod_base = OTHER; note = 2'-O-methyl modified nucleotide
  modified_base 93: mod_base = OTHER; note = 2'-O-methyl modified nucleotide
  modified_base 94: mod_base = OTHER; note = 2'-O-methyl modified nucleotide
  modified_base 95: mod_base = OTHER; note = 2'-O-methyl modified nucleotide
  modified_base 96: mod_base = OTHER; note = 2'-O-methyl modified nucleotide
  modified_base 117: mod_base = OTHER; note = Nucleotide with phosphorothioate linkage
  modified_base 118: mod_base = OTHER; note = 2'-O-methyl modified nucleotide with phosphorothioate linkage
  modified_base 119: mod_base = OTHER; note = 2'-O-methyl modified nucleotide with phosphorothioate linkage
  modified_base 120: mod_base = OTHER; note = 2'-O-methyl modified nucleotide
gagtagcgcgagcacagctagttttagagctagaaatagcaagttaaaataaggctagtccgttatcaacttgaaaaagtggcaccgagtcggtgctggccttagtaaccctgtgctcgc

SEQ ID NO: 17827 - RNA, 119 nt, synthetic construct
  source 1..119: mol_type = other RNA
  modified_base 1: mod_base = OTHER; note = 2'-O-methyl modified nucleotide with phosphorothioate linkage
  modified_base 2: mod_base = OTHER; note = 2'-O-methyl modified nucleotide with phosphorothioate linkage
  modified_base 3: mod_base = OTHER; note = 2'-O-methyl modified nucleotide with phosphorothioate linkage
  modified_base 29: mod_base = OTHER; note = 2'-O-methyl modified nucleotide
  modified_base 30: mod_base = OTHER; note = 2'-O-methyl modified nucleotide
  modified_base 31: mod_base = OTHER; note = 2'-O-methyl modified nucleotide
  modified_base 32: mod_base = OTHER; note = 2'-O-methyl modified nucleotide
  modified_base 33: mod_base = OTHER; note = 2'-O-methyl modified nucleotide
  modified_base 34: mod_base = OTHER; note = 2'-O-methyl modified nucleotide
  modified_base 35: mod_base = OTHER; note = 2'-O-methyl modified nucleotide
  modified_base 36: mod_base = OTHER; note = 2'-O-methyl modified nucleotide
  modified_base 37: mod_base = OTHER; note = 2'-O-methyl modified nucleotide
  modified_base 38: mod_base = OTHER; note = 2'-O-methyl modified nucleotide
  modified_base 39: mod_base = OTHER; note = 2'-O-methyl modified nucleotide
  modified_base 40: mod_base = OTHER; note = 2'-O-methyl modified nucleotide
  modified_base 69: mod_base = OTHER; note = 2'-O-methyl modified nucleotide
  modified_base 70: mod_base = OTHER; note = 2'-O-methyl modified nucleotide
  modified_base 71: mod_base = OTHER; note = 2'-O-methyl modified nucleotide
  modified_base 72: mod_base = OTHER; note = 2'-O-methyl modified nucleotide
  modified_base 73: mod_base = OTHER; note = 2'-O-methyl modified nucleotide
  modified_base 74: mod_base = OTHER; note = 2'-O-methyl modified nucleotide
  modified_base 75: mod_base = OTHER; note = 2'-O-methyl modified nucleotide
  modified_base 76: mod_base = OTHER; note = 2'-O-methyl modified nucleotide
  modified_base 77: mod_base = OTHER; note = 2'-O-methyl modified nucleotide
  modified_base 78: mod_base = OTHER; note = 2'-O-methyl modified nucleotide
  modified_base 79: mod_base = OTHER; note = 2'-O-methyl modified nucleotide
  modified_base 80: mod_base = OTHER; note = 2'-O-methyl modified nucleotide
  modified_base 81: mod_base = OTHER; note = 2'-O-methyl modified nucleotide
  modified_base 82: mod_base = OTHER; note = 2'-O-methyl modified nucleotide
  modified_base 83: mod_base = OTHER; note = 2'-O-methyl modified nucleotide
  modified_base 84: mod_base = OTHER; note = 2'-O-methyl modified nucleotide
  modified_base 85: mod_base = OTHER; note = 2'-O-methyl modified nucleotide
  modified_base 86: mod_base = OTHER; note = 2'-O-methyl modified nucleotide
  modified_base 87: mod_base = OTHER; note = 2'-O-methyl modified nucleotide
  modified_base 88: mod_base = OTHER; note = 2'-O-methyl modified nucleotide
  modified_base 89: mod_base = OTHER; note = 2'-O-methyl modified nucleotide
  modified_base 90: mod_base = OTHER; note = 2'-O-methyl modified nucleotide
  modified_base 91: mod_base = OTHER; note = 2'-O-methyl modified nucleotide
  modified_base 92: mod_base = OTHER; note = 2'-O-methyl modified nucleotide
  modified_base 93: mod_base = OTHER; note = 2'-O-methyl modified nucleotide
  modified_base 94: mod_base = OTHER; note = 2'-O-methyl modified nucleotide
  modified_base 95: mod_base = OTHER; note = 2'-O-methyl modified nucleotide
  modified_base 96: mod_base = OTHER; note = 2'-O-methyl modified nucleotide
  modified_base 116: mod_base = OTHER; note = Nucleotide with phosphorothioate linkage
  modified_base 117: mod_base = OTHER; note = 2'-O-methyl modified nucleotide with phosphorothioate linkage
  modified_base 118: mod_base = OTHER; note = 2'-O-methyl modified nucleotide with phosphorothioate linkage
  modified_base 119: mod_base = OTHER; note = 2'-O-methyl modified nucleotide
gagtagcgcgagcacagctagttttagagctagaaatagcaagttaaaataaggctagtccgttatcaacttgaaaaagtggcaccgagtcggtgctggccttagtaaccctgtgctcg

SEQ ID NO: 17828 - RNA, 118 nt, synthetic construct
  source 1..118: mol_type = other RNA
  modified_base 1: mod_base = OTHER; note = 2'-O-methyl modified nucleotide with phosphorothioate linkage
  modified_base 2: mod_base = OTHER; note = 2'-O-methyl modified nucleotide with phosphorothioate linkage
  modified_base 3: mod_base = OTHER; note = 2'-O-methyl modified nucleotide with phosphorothioate linkage
  modified_base 29: mod_base = OTHER; note = 2'-O-methyl modified nucleotide
  modified_base 30: mod_base = OTHER; note = 2'-O-methyl modified nucleotide
  modified_base 31: mod_base = OTHER; note = 2'-O-methyl modified nucleotide
  modified_base 32: mod_base = OTHER; note = 2'-O-methyl modified nucleotide
  modified_base 33: mod_base = OTHER; note = 2'-O-methyl modified nucleotide
  modified_base 34: mod_base = OTHER; note = 2'-O-methyl modified nucleotide
  modified_base 35: mod_base = OTHER; note = 2'-O-methyl modified nucleotide
  modified_base 36: mod_base = OTHER; note = 2'-O-methyl modified nucleotide
  modified_base 37: mod_base = OTHER; note = 2'-O-methyl modified nucleotide
  modified_base 38: mod_base = OTHER; note = 2'-O-methyl modified nucleotide
  modified_base 39: mod_base = OTHER; note = 2'-O-methyl modified nucleotide
  modified_base 40: mod_base = OTHER; note = 2'-O-methyl modified nucleotide
  modified_base 69: mod_base = OTHER; note = 2'-O-methyl modified nucleotide
  modified_base 70: mod_base = OTHER; note = 2'-O-methyl modified nucleotide
  modified_base 71: mod_base = OTHER; note = 2'-O-methyl modified nucleotide
  modified_base 72: mod_base = OTHER; note = 2'-O-methyl modified nucleotide
  modified_base 73: mod_base = OTHER; note = 2'-O-methyl modified nucleotide
  modified_base 74: mod_base = OTHER; note = 2'-O-methyl modified nucleotide
  modified_base 75: mod_base = OTHER; note = 2'-O-methyl modified nucleotide
  modified_base 76: mod_base = OTHER; note = 2'-O-methyl modified nucleotide
  modified_base 77: mod_base = OTHER; note = 2'-O-methyl modified nucleotide
  modified_base 78: mod_base = OTHER; note = 2'-O-methyl modified nucleotide
  modified_base 79: mod_base = OTHER; note = 2'-O-methyl modified nucleotide
  modified_base 80: mod_base = OTHER; note = 2'-O-methyl modified nucleotide
  modified_base 81: mod_base = OTHER; note = 2'-O-methyl modified nucleotide
  modified_base 82: mod_base = OTHER; note = 2'-O-methyl modified nucleotide
  modified_base 83: mod_base = OTHER; note = 2'-O-methyl modified nucleotide
  modified_base 84: mod_base = OTHER; note = 2'-O-methyl modified nucleotide
  modified_base 85: mod_base = OTHER; note = 2'-O-methyl modified nucleotide
  modified_base 86: mod_base = OTHER; note = 2'-O-methyl modified nucleotide
  modified_base 87: mod_base = OTHER; note = 2'-O-methyl modified nucleotide
  modified_base 88: mod_base = OTHER; note = 2'-O-methyl modified nucleotide
  modified_base 89: mod_base = OTHER; note = 2'-O-methyl modified nucleotide
  modified_base 90: mod_base = OTHER; note = 2'-O-methyl modified nucleotide
  modified_base 91: mod_base = OTHER; note = 2'-O-methyl modified nucleotide
  modified_base 92: mod_base = OTHER; note = 2'-O-methyl modified nucleotide
  modified_base 93: mod_base = OTHER; note = 2'-O-methyl modified nucleotide
  modified_base 94: mod_base = OTHER; note = 2'-O-methyl modified nucleotide
  modified_base 95: mod_base = OTHER; note = 2'-O-methyl modified nucleotide
  modified_base 96: mod_base = OTHER; note = 2'-O-methyl modified nucleotide
  modified_base 115: mod_base = OTHER; note = Nucleotide with phosphorothioate linkage
  modified_base 116: mod_base = OTHER; note = 2'-O-methyl modified nucleotide with phosphorothioate linkage
  modified_base 117: mod_base = OTHER; note = 2'-O-methyl modified nucleotide with phosphorothioate linkage
  modified_base 118: mod_base = OTHER; note = 2'-O-methyl modified nucleotide
gagtagcgcgagcacagctagttttagagctagaaatagcaagttaaaataaggctagtccgttatcaacttgaaaaagtggcaccgagtcggtgctggccttagtaaccctgtgctc

SEQ ID NO: 17829 - RNA, 125 nt, synthetic construct
  source 1..125: mol_type = other RNA
  modified_base 1: mod_base = OTHER; note = 2'-O-methyl modified nucleotide with phosphorothioate linkage
  modified_base 2: mod_base = OTHER; note = 2'-O-methyl modified nucleotide with phosphorothioate linkage
  modified_base 3: mod_base = OTHER; note = 2'-O-methyl modified nucleotide with phosphorothioate linkage
  modified_base 29: mod_base = OTHER; note = 2'-O-methyl modified nucleotide
  modified_base 30: mod_base = OTHER; note = 2'-O-methyl modified nucleotide
  modified_base 31: mod_base = OTHER; note = 2'-O-methyl modified nucleotide
  modified_base 32: mod_base = OTHER; note = 2'-O-methyl modified nucleotide
  modified_base 33: mod_base = OTHER; note = 2'-O-methyl modified nucleotide
  modified_base 34: mod_base = OTHER; note = 2'-O-methyl modified nucleotide
  modified_base 35: mod_base = OTHER; note = 2'-O-methyl modified nucleotide
  modified_base 36: mod_base = OTHER; note = 2'-O-methyl modified nucleotide
  modified_base 37: mod_base = OTHER; note = 2'-O-methyl modified nucleotide
  modified_base 38: mod_base = OTHER; note = 2'-O-methyl modified nucleotide
  modified_base 39: mod_base = OTHER; note = 2'-O-methyl modified nucleotide
  modified_base 40: mod_base = OTHER; note = 2'-O-methyl modified nucleotide
  modified_base 69: mod_base = OTHER; note = 2'-O-methyl modified nucleotide
  modified_base 70: mod_base = OTHER; note = 2'-O-methyl modified nucleotide
  modified_base 71: mod_base = OTHER; note = 2'-O-methyl modified nucleotide
  modified_base 72: mod_base = OTHER; note = 2'-O-methyl modified nucleotide
  modified_base 73: mod_base = OTHER; note = 2'-O-methyl modified nucleotide
  modified_base 74: mod_base = OTHER; note = 2'-O-methyl modified nucleotide
  modified_base 75: mod_base = OTHER; note = 2'-O-methyl modified nucleotide
  modified_base 76: mod_base = OTHER; note = 2'-O-methyl modified nucleotide
  modified_base 77: mod_base = OTHER; note = 2'-O-methyl modified nucleotide
  modified_base 78: mod_base = OTHER; note = 2'-O-methyl modified nucleotide
  modified_base 79: mod_base = OTHER; note = 2'-O-methyl modified nucleotide
  modified_base 80: mod_base = OTHER; note = 2'-O-methyl modified nucleotide
  modified_base 81: mod_base = OTHER; note = 2'-O-methyl modified nucleotide
  modified_base 82: mod_base = OTHER; note = 2'-O-methyl modified nucleotide
  modified_base 83: mod_base = OTHER; note = 2'-O-methyl modified nucleotide
  modified_base 84: mod_base = OTHER; note = 2'-O-methyl modified nucleotide
  modified_base 85: mod_base = OTHER; note = 2'-O-methyl modified nucleotide
  modified_base 86: mod_base = OTHER; note = 2'-O-methyl modified nucleotide
  modified_base 87: mod_base = OTHER; note = 2'-O-methyl modified nucleotide
  modified_base 88: mod_base = OTHER; note = 2'-O-methyl modified nucleotide
  modified_base 89: mod_base = OTHER; note = 2'-O-methyl modified nucleotide
  modified_base 90: mod_base = OTHER; note = 2'-O-methyl modified nucleotide
  modified_base 91: mod_base = OTHER; note = 2'-O-methyl modified nucleotide
  modified_base 92: mod_base = OTHER; note = 2'-O-methyl modified nucleotide
  modified_base 93: mod_base = OTHER; note = 2'-O-methyl modified nucleotide
  modified_base 94: mod_base = OTHER; note = 2'-O-methyl modified nucleotide
  modified_base 95: mod_base = OTHER; note = 2'-O-methyl modified nucleotide
  modified_base 96: mod_base = OTHER; note = 2'-O-methyl modified nucleotide
  modified_base 122: mod_base = OTHER; note = Nucleotide with phosphorothioate linkage
  modified_base 123: mod_base = OTHER; note = 2'-O-methyl modified nucleotide with phosphorothioate linkage
  modified_base 124: mod_base = OTHER; note = 2'-O-methyl modified nucleotide with phosphorothioate linkage
  modified_base 125: mod_base = OTHER; note = 2'-O-methyl modified nucleotide
gagtagcgcgagcacagctagttttagagctagaaatagcaagttaaaataaggctagtccgttatcaacttgaaaaagtggcaccgagtcggtgccgtggccttagtaaccctgtgctcgcgct

SEQ ID NO: 17830 - RNA, 124 nt, synthetic construct
  source 1..124: mol_type = other RNA
  modified_base 1: mod_base = OTHER; note = 2'-O-methyl modified nucleotide with phosphorothioate linkage
  modified_base 2: mod_base = OTHER; note = 2'-O-methyl modified nucleotide with phosphorothioate linkage
  modified_base 3: mod_base = OTHER; note = 2'-O-methyl modified nucleotide with phosphorothioate linkage
  modified_base 29: mod_base = OTHER; note = 2'-O-methyl modified nucleotide
  modified_base 30: mod_base = OTHER; note = 2'-O-methyl modified nucleotide
  modified_base 31: mod_base = OTHER; note = 2'-O-methyl modified nucleotide
  modified_base 32: mod_base = OTHER; note = 2'-O-methyl modified nucleotide
  modified_base 33: mod_base = OTHER; note = 2'-O-methyl modified nucleotide
  modified_base 34: mod_base = OTHER; note = 2'-O-methyl modified nucleotide
  modified_base 35: mod_base = OTHER; note = 2'-O-methyl modified nucleotide
  modified_base 36: mod_base = OTHER; note = 2'-O-methyl modified nucleotide
  modified_base 37: mod_base = OTHER; note = 2'-O-methyl modified nucleotide
  modified_base 38: mod_base = OTHER; note = 2'-O-methyl modified nucleotide
  modified_base 39: mod_base = OTHER; note = 2'-O-methyl modified nucleotide
  modified_base 40: mod_base = OTHER; note = 2'-O-methyl modified nucleotide
  modified_base 69: mod_base = OTHER; note = 2'-O-methyl modified nucleotide
  modified_base 70: mod_base = OTHER; note = 2'-O-methyl modified nucleotide
  modified_base 71: mod_base = OTHER; note = 2'-O-methyl modified nucleotide
  modified_base 72: mod_base = OTHER; note = 2'-O-methyl modified nucleotide
  modified_base 73: mod_base = OTHER; note = 2'-O-methyl modified nucleotide
  modified_base 74: mod_base = OTHER; note = 2'-O-methyl modified nucleotide
  modified_base 75: mod_base = OTHER; note = 2'-O-methyl modified nucleotide
  modified_base 76: mod_base = OTHER; note = 2'-O-methyl modified nucleotide
  modified_base 77: mod_base = OTHER; note = 2'-O-methyl modified nucleotide
  modified_base 78: mod_base = OTHER; note = 2'-O-methyl modified nucleotide
  modified_base 79: mod_base = OTHER; note = 2'-O-methyl modified nucleotide
  modified_base 80: mod_base = OTHER; note = 2'-O-methyl modified nucleotide
  modified_base 81: mod_base = OTHER; note = 2'-O-methyl modified nucleotide
  modified_base 82: mod_base = OTHER; note = 2'-O-methyl modified nucleotide
  modified_base 83: mod_base = OTHER; note = 2'-O-methyl modified nucleotide
  modified_base 84: mod_base = OTHER; note = 2'-O-methyl modified nucleotide
  modified_base 85: mod_base = OTHER; note = 2'-O-methyl modified nucleotide
  modified_base 86: mod_base = OTHER; note = 2'-O-methyl modified nucleotide
  modified_base 87: mod_base = OTHER; note = 2'-O-methyl modified nucleotide
  modified_base 88: mod_base = OTHER; note = 2'-O-methyl modified nucleotide
  modified_base 89: mod_base = OTHER; note = 2'-O-methyl modified nucleotide
  modified_base 90: mod_base = OTHER; note = 2'-O-methyl modified nucleotide
  modified_base 91: mod_base = OTHER; note = 2'-O-methyl modified nucleotide
  modified_base 92: mod_base = OTHER; note = 2'-O-methyl modified nucleotide
  modified_base 93: mod_base = OTHER; note = 2'-O-methyl modified nucleotide
  modified_base 94: mod_base = OTHER; note = 2'-O-methyl modified nucleotide
  modified_base 95: mod_base = OTHER; note = 2'-O-methyl modified nucleotide
  modified_base 96: mod_base = OTHER; note = 2'-O-methyl modified nucleotide
  modified_base 121: mod_base = OTHER; note = Nucleotide with phosphorothioate linkage
  modified_base 122: mod_base = OTHER; note = 2'-O-methyl modified nucleotide with phosphorothioate linkage
  modified_base 123: mod_base = OTHER; note = 2'-O-methyl modified nucleotide with phosphorothioate linkage
  modified_base 124: mod_base = OTHER; note = 2'-O-methyl modified nucleotide
gagtagcgcgagcacagctagttttagagctagaaatagcaagttaaaataaggctagtccgttatcaacttgaaaaagtggcaccgagtcggtgccgtggccttagtaaccctgtgctcgcgc

SEQ ID NO: 17831 - RNA, 123 nt, synthetic construct
  source 1..123: mol_type = other RNA
  modified_base 1: mod_base = OTHER; note = 2'-O-methyl modified nucleotide with phosphorothioate linkage
  modified_base 2: mod_base = OTHER; note = 2'-O-methyl modified nucleotide with phosphorothioate linkage
  modified_base 3: mod_base = OTHER; note = 2'-O-methyl modified nucleotide with phosphorothioate linkage
  modified_base 29: mod_base = OTHER; note = 2'-O-methyl modified nucleotide
  modified_base 30: mod_base = OTHER; note = 2'-O-methyl modified nucleotide
  modified_base 31: mod_base = OTHER; note = 2'-O-methyl modified nucleotide
  modified_base 32: mod_base = OTHER; note = 2'-O-methyl modified nucleotide
  modified_base 33: mod_base = OTHER; note = 2'-O-methyl modified nucleotide
  modified_base 34: mod_base = OTHER; note = 2'-O-methyl modified nucleotide
  modified_base 35: mod_base = OTHER; note = 2'-O-methyl modified nucleotide
  modified_base 36: mod_base = OTHER; note = 2'-O-methyl modified nucleotide
  modified_base 37: mod_base = OTHER; note = 2'-O-methyl modified nucleotide
  modified_base 38: mod_base = OTHER; note = 2'-O-methyl modified nucleotide
  modified_base 39: mod_base = OTHER; note = 2'-O-methyl modified nucleotide
  modified_base 40: mod_base = OTHER; note = 2'-O-methyl modified nucleotide
  modified_base 69: mod_base = OTHER; note = 2'-O-methyl modified nucleotide
  modified_base 70: mod_base = OTHER; note = 2'-O-methyl modified nucleotide
  modified_base 71: mod_base = OTHER; note = 2'-O-methyl modified nucleotide
  modified_base 72: mod_base = OTHER; note = 2'-O-methyl modified nucleotide
  modified_base 73: mod_base = OTHER; note = 2'-O-methyl modified nucleotide
  modified_base 74: mod_base = OTHER; note = 2'-O-methyl modified nucleotide
  modified_base 75: mod_base = OTHER; note = 2'-O-methyl modified nucleotide
  modified_base 76: mod_base = OTHER; note = 2'-O-methyl modified nucleotide
  modified_base 77: mod_base = OTHER; note = 2'-O-methyl modified nucleotide
  modified_base 78: mod_base = OTHER; note = 2'-O-methyl modified nucleotide
  modified_base 79: mod_base = OTHER; note = 2'-O-methyl modified nucleotide
  modified_base 80: mod_base = OTHER; note = 2'-O-methyl modified nucleotide
  modified_base 81: mod_base = OTHER; note = 2'-O-methyl modified nucleotide
  modified_base 82: mod_base = OTHER; note = 2'-O-methyl modified nucleotide
  modified_base 83: mod_base = OTHER; note = 2'-O-methyl modified nucleotide
  modified_base 84: mod_base = OTHER; note = 2'-O-methyl modified nucleotide
  modified_base 85: mod_base = OTHER; note = 2'-O-methyl modified nucleotide
  modified_base 86: mod_base = OTHER; note = 2'-O-methyl modified nucleotide
  modified_base 87: mod_base = OTHER; note = 2'-O-methyl modified nucleotide
  modified_base 88: mod_base = OTHER; note = 2'-O-methyl modified nucleotide
  modified_base 89: mod_base = OTHER; note = 2'-O-methyl modified nucleotide
  modified_base 90: mod_base = OTHER; note = 2'-O-methyl modified nucleotide
  modified_base 91: mod_base = OTHER; note = 2'-O-methyl modified nucleotide
  modified_base 92: mod_base = OTHER; note = 2'-O-methyl modified nucleotide
  modified_base 93: mod_base = OTHER; note = 2'-O-methyl modified nucleotide
  modified_base 94: mod_base = OTHER; note = 2'-O-methyl modified nucleotide
  modified_base 95: mod_base = OTHER; note = 2'-O-methyl modified nucleotide
  modified_base 96: mod_base = OTHER; note = 2'-O-methyl modified nucleotide
  modified_base 120: mod_base = OTHER; note = Nucleotide with phosphorothioate linkage
  modified_base 121: mod_base = OTHER; note = 2'-O-methyl modified nucleotide with phosphorothioate linkage
  modified_base 122: mod_base = OTHER; note = 2'-O-methyl modified nucleotide with phosphorothioate linkage
  modified_base 123: mod_base = OTHER; note = 2'-O-methyl modified nucleotide
gagtagcgcgagcacagctagttttagagctagaaatagcaagttaaaataaggctagtccgttatcaacttgaaaaagtggcaccgagtcggtgccgtggccttagtaaccctgtgctcgcg

SEQ ID NO: 17832 - RNA, 122 nt, synthetic construct
  source 1..122: mol_type = other RNA
  modified_base 1: mod_base = OTHER; note = 2'-O-methyl modified nucleotide with phosphorothioate linkage
  modified_base 2: mod_base = OTHER; note = 2'-O-methyl modified nucleotide with phosphorothioate linkage
  modified_base 3: mod_base = OTHER; note = 2'-O-methyl modified nucleotide with phosphorothioate linkage
  modified_base 29: mod_base = OTHER; note = 2'-O-methyl modified nucleotide
  modified_base 30: mod_base = OTHER; note = 2'-O-methyl modified nucleotide
  modified_base 31: mod_base = OTHER; note = 2'-O-methyl modified nucleotide
  modified_base 32: mod_base = OTHER; note = 2'-O-methyl modified nucleotide
  modified_base 33: mod_base = OTHER; note = 2'-O-methyl modified nucleotide
  modified_base 34: mod_base = OTHER; note = 2'-O-methyl modified nucleotide
  modified_base 35: mod_base = OTHER; note = 2'-O-methyl modified nucleotide
  modified_base 36: mod_base = OTHER; note = 2'-O-methyl modified nucleotide
  modified_base 37: mod_base = OTHER; note = 2'-O-methyl modified nucleotide
  modified_base 38: mod_base = OTHER; note = 2'-O-methyl modified nucleotide
  modified_base 39: mod_base = OTHER; note = 2'-O-methyl modified nucleotide
  modified_base 40: mod_base = OTHER; note = 2'-O-methyl modified nucleotide
  modified_base 69: mod_base = OTHER; note = 2'-O-methyl modified nucleotide
  modified_base 70: mod_base = OTHER; note = 2'-O-methyl modified nucleotide
  modified_base 71: mod_base = OTHER; note = 2'-O-methyl modified nucleotide
  modified_base 72: mod_base = OTHER; note = 2'-O-methyl modified nucleotide
  modified_base 73: mod_base = OTHER; note = 2'-O-methyl modified nucleotide
  modified_base 74: mod_base = OTHER; note = 2'-O-methyl modified nucleotide
  modified_base 75: mod_base = OTHER; note = 2'-O-methyl modified nucleotide
  modified_base 76: mod_base = OTHER; note = 2'-O-methyl modified nucleotide
  modified_base 77: mod_base = OTHER; note = 2'-O-methyl modified nucleotide
  modified_base 78: mod_base = OTHER; note = 2'-O-methyl modified nucleotide
  modified_base 79: mod_base = OTHER; note = 2'-O-methyl modified nucleotide
  modified_base 80: mod_base = OTHER; note = 2'-O-methyl modified nucleotide
  modified_base 81: mod_base = OTHER; note = 2'-O-methyl modified nucleotide
  modified_base 82: mod_base = OTHER; note = 2'-O-methyl modified nucleotide
  modified_base 83: mod_base = OTHER; note = 2'-O-methyl modified nucleotide
  modified_base 84: mod_base = OTHER; note = 2'-O-methyl modified nucleotide
  modified_base 85: mod_base = OTHER; note = 2'-O-methyl modified nucleotide
  modified_base 86: mod_base = OTHER; note = 2'-O-methyl modified nucleotide
  modified_base 87: mod_base = OTHER; note = 2'-O-methyl modified nucleotide
  modified_base 88: mod_base = OTHER; note = 2'-O-methyl modified nucleotide
  modified_base 89: mod_base = OTHER; note = 2'-O-methyl modified nucleotide
  modified_base 90: mod_base = OTHER; note = 2'-O-methyl modified nucleotide
  modified_base 91: mod_base = OTHER; note = 2'-O-methyl modified nucleotide
  modified_base 92: mod_base = OTHER; note = 2'-O-methyl modified nucleotide
  modified_base 93: mod_base = OTHER; note = 2'-O-methyl modified nucleotide
  modified_base 94: mod_base = OTHER; note = 2'-O-methyl modified nucleotide
  modified_base 95: mod_base = OTHER; note = 2'-O-methyl modified nucleotide
  modified_base 96: mod_base = OTHER; note = 2'-O-methyl modified nucleotide
  modified_base 119: mod_base = OTHER; note = Nucleotide with phosphorothioate linkage
  modified_base 120: mod_base = OTHER; note = 2'-O-methyl modified nucleotide with phosphorothioate linkage
  modified_base 121: mod_base = OTHER; note = 2'-O-methyl modified nucleotide with phosphorothioate linkage
  modified_base 122: mod_base = OTHER; note = 2'-O-methyl modified nucleotide
gagtagcgcgagcacagctagttttagagctagaaatagcaagttaaaataaggctagtccgttatcaacttgaaaaagtggcaccgagtcggtgccgtggccttagtaaccctgtgctcgc

SEQ ID NO: 17833 - RNA, 121 nt, synthetic construct
  source 1..121: mol_type = other RNA
  modified_base 1: mod_base = OTHER; note = 2'-O-methyl modified nucleotide with phosphorothioate linkage
  modified_base 2: mod_base = OTHER; note = 2'-O-methyl modified nucleotide with phosphorothioate linkage
  modified_base 3: mod_base = OTHER; note = 2'-O-methyl modified nucleotide with phosphorothioate linkage
  modified_base 29: mod_base = OTHER; note = 2'-O-methyl modified nucleotide
  modified_base 30: mod_base = OTHER; note = 2'-O-methyl modified nucleotide
  modified_base 31: mod_base = OTHER; note = 2'-O-methyl modified nucleotide
  modified_base 32: mod_base = OTHER; note = 2'-O-methyl modified nucleotide
  modified_base 33: mod_base = OTHER; note = 2'-O-methyl modified nucleotide
  modified_base 34: mod_base = OTHER; note = 2'-O-methyl modified nucleotide
  modified_base 35: mod_base = OTHER; note = 2'-O-methyl modified nucleotide
  modified_base 36: mod_base = OTHER; note = 2'-O-methyl modified nucleotide
  modified_base 37: mod_base = OTHER; note = 2'-O-methyl modified nucleotide
  modified_base 38: mod_base = OTHER; note = 2'-O-methyl modified nucleotide
  modified_base 39: mod_base = OTHER; note = 2'-O-methyl modified nucleotide
  modified_base 40: mod_base = OTHER; note = 2'-O-methyl modified nucleotide
  modified_base 69: mod_base = OTHER; note = 2'-O-methyl modified nucleotide
  modified_base 70: mod_base = OTHER; note = 2'-O-methyl modified nucleotide
  modified_base 71: mod_base = OTHER; note = 2'-O-methyl modified nucleotide
  modified_base 72: mod_base = OTHER; note = 2'-O-methyl modified nucleotide
  modified_base 73: mod_base = OTHER; note = 2'-O-methyl modified nucleotide
  modified_base 74: mod_base = OTHER; note = 2'-O-methyl modified nucleotide
  modified_base 75: mod_base = OTHER; note = 2'-O-methyl modified nucleotide
  modified_base 76: mod_base = OTHER; note = 2'-O-methyl modified nucleotide
  modified_base 77: mod_base = OTHER; note = 2'-O-methyl modified nucleotide
  modified_base 78: mod_base = OTHER; note = 2'-O-methyl modified nucleotide
  modified_base 79: mod_base = OTHER; note = 2'-O-methyl modified nucleotide
  modified_base 80: mod_base = OTHER; note = 2'-O-methyl modified nucleotide
  modified_base 81: mod_base = OTHER; note = 2'-O-methyl modified nucleotide
  modified_base 82: mod_base = OTHER; note = 2'-O-methyl modified nucleotide
  modified_base 83: mod_base = OTHER; note = 2'-O-methyl modified nucleotide
  modified_base 84: mod_base = OTHER; note = 2'-O-methyl modified nucleotide
  modified_base 85: mod_base = OTHER; note = 2'-O-methyl modified nucleotide
  modified_base 86: mod_base = OTHER; note = 2'-O-methyl modified nucleotide
  modified_base 87: mod_base = OTHER; note = 2'-O-methyl modified nucleotide
  modified_base 88: mod_base = OTHER; note = 2'-O-methyl modified nucleotide
  modified_base 89: mod_base = OTHER; note = 2'-O-methyl modified nucleotide
  modified_base 90: mod_base = OTHER; note = 2'-O-methyl modified nucleotide
  modified_base 91: mod_base = OTHER; note = 2'-O-methyl modified nucleotide
  modified_base 92: mod_base = OTHER; note = 2'-O-methyl modified nucleotide
  modified_base 93: mod_base = OTHER; note = 2'-O-methyl modified nucleotide
  modified_base 94: mod_base = OTHER; note = 2'-O-methyl modified nucleotide
  modified_base 95: mod_base = OTHER; note = 2'-O-methyl modified nucleotide
  modified_base 96: mod_base = OTHER; note = 2'-O-methyl modified nucleotide
  modified_base 118: mod_base = OTHER; note = Nucleotide with phosphorothioate linkage
  modified_base 119: mod_base = OTHER; note = 2'-O-methyl modified nucleotide with phosphorothioate linkage
  modified_base 120: mod_base = OTHER; note = 2'-O-methyl modified nucleotide with phosphorothioate linkage
  modified_base 121: mod_base = OTHER; note = 2'-O-methyl modified nucleotide
gagtagcgcgagcacagctagttttagagctagaaatagcaagttaaaataaggctagtccgttatcaacttgaaaaagtggcaccgagtcggtgccgtggccttagtaaccctgtgctcg

SEQ ID NO: 17834 - RNA, 120 nt, synthetic construct
  source 1..120: mol_type = other RNA
  modified_base 1: mod_base = OTHER; note = 2'-O-methyl modified nucleotide with phosphorothioate linkage
  modified_base 2: mod_base = OTHER; note = 2'-O-methyl modified nucleotide with phosphorothioate linkage
  modified_base 3: mod_base = OTHER; note = 2'-O-methyl modified nucleotide with phosphorothioate linkage
  modified_base 29: mod_base = OTHER; note = 2'-O-methyl modified nucleotide
  modified_base 30: mod_base = OTHER; note = 2'-O-methyl modified nucleotide
  modified_base 31: mod_base = OTHER; note = 2'-O-methyl modified nucleotide
  modified_base 32: mod_base = OTHER; note = 2'-O-methyl modified nucleotide
  modified_base 33: mod_base = OTHER; note = 2'-O-methyl modified nucleotide
  modified_base 34: mod_base = OTHER; note = 2'-O-methyl modified nucleotide
  modified_base 35: mod_base = OTHER; note = 2'-O-methyl modified nucleotide
  modified_base 36: mod_base = OTHER; note = 2'-O-methyl modified nucleotide
  modified_base 37: mod_base = OTHER; note = 2'-O-methyl modified nucleotide
  modified_base 38: mod_base = OTHER; note = 2'-O-methyl modified nucleotide
  modified_base 39: mod_base = OTHER; note = 2'-O-methyl modified nucleotide
  modified_base 40: mod_base = OTHER; note = 2'-O-methyl modified nucleotide
  modified_base 69: mod_base = OTHER; note = 2'-O-methyl modified nucleotide
  modified_base 70: mod_base = OTHER; note = 2'-O-methyl modified nucleotide
  modified_base 71: mod_base = OTHER; note = 2'-O-methyl modified nucleotide
  modified_base 72: mod_base = OTHER; note = 2'-O-methyl modified nucleotide
  modified_base 73: mod_base = OTHER; note = 2'-O-methyl modified nucleotide
  modified_base 74: mod_base = OTHER; note = 2'-O-methyl modified nucleotide
  modified_base 75: mod_base = OTHER; note = 2'-O-methyl modified nucleotide
  modified_base 76: mod_base = OTHER; note = 2'-O-methyl modified nucleotide
  modified_base 77: mod_base = OTHER; note = 2'-O-methyl modified nucleotide
  modified_base 78: mod_base = OTHER; note = 2'-O-methyl modified nucleotide
  modified_base 79: mod_base = OTHER; note = 2'-O-methyl modified nucleotide
  modified_base 80: mod_base = OTHER; note = 2'-O-methyl modified nucleotide
  modified_base 81: mod_base = OTHER; note = 2'-O-methyl modified nucleotide
  modified_base 82: mod_base = OTHER; note = 2'-O-methyl modified nucleotide
  modified_base 83: mod_base = OTHER; note = 2'-O-methyl modified nucleotide
  modified_base 84: mod_base = OTHER; note = 2'-O-methyl modified nucleotide
  modified_base 85: mod_base = OTHER; note = 2'-O-methyl modified nucleotide
  modified_base 86: mod_base = OTHER; note = 2'-O-methyl modified nucleotide
  modified_base 87: mod_base = OTHER; note = 2'-O-methyl modified nucleotide
  modified_base 88: mod_base = OTHER; note = 2'-O-methyl modified nucleotide
  modified_base 89: mod_base = OTHER; note = 2'-O-methyl modified nucleotide
  modified_base 90: mod_base = OTHER; note = 2'-O-methyl modified nucleotide
  modified_base 91: mod_base = OTHER; note = 2'-O-methyl modified nucleotide
  modified_base 92: mod_base = OTHER; note = 2'-O-methyl modified nucleotide
  modified_base 93: mod_base = OTHER; note = 2'-O-methyl modified nucleotide
  modified_base 94: mod_base = OTHER; note = 2'-O-methyl modified nucleotide
  modified_base 95: mod_base = OTHER; note = 2'-O-methyl modified nucleotide
  modified_base 96: mod_base = OTHER; note = 2'-O-methyl modified nucleotide
  modified_base 117: mod_base = OTHER; note = Nucleotide with phosphorothioate linkage
  modified_base 118: mod_base = OTHER; note = 2'-O-methyl modified nucleotide with phosphorothioate linkage
  modified_base 119: mod_base = OTHER; note = 2'-O-methyl modified nucleotide with phosphorothioate linkage
  modified_base 120: mod_base = OTHER; note = 2'-O-methyl modified nucleotide
gagtagcgcgagcacagctagttttagagctagaaatagcaagttaaaataaggctagtccgttatcaacttgaaaaagtggcaccgagtcggtgccgtggccttagtaaccctgtgctc

SEQ ID NO: 17835 - RNA, 127 nt, synthetic construct
  source 1..127: mol_type = other RNA
  modified_base 1: mod_base = OTHER; note = 2'-O-methyl modified nucleotide with phosphorothioate linkage
  modified_base 2: mod_base = OTHER; note = 2'-O-methyl modified nucleotide with phosphorothioate linkage
  modified_base 3: mod_base = OTHER; note = 2'-O-methyl modified nucleotide with phosphorothioate linkage
  modified_base 29: mod_base = OTHER; note = 2'-O-methyl modified nucleotide
  modified_base 30: mod_base = OTHER; note = 2'-O-methyl modified nucleotide
  modified_base 31: mod_base = OTHER; note = 2'-O-methyl modified nucleotide
  modified_base 32: mod_base = OTHER; note = 2'-O-methyl modified nucleotide
  modified_base 33: mod_base = OTHER; note = 2'-O-methyl modified nucleotide
  modified_base 34: mod_base = OTHER; note = 2'-O-methyl modified nucleotide
  modified_base 35: mod_base = OTHER; note = 2'-O-methyl modified nucleotide
  modified_base 36: mod_base = OTHER; note = 2'-O-methyl modified nucleotide
  modified_base 37: mod_base = OTHER; note = 2'-O-methyl modified nucleotide
  modified_base 38: mod_base = OTHER; note = 2'-O-methyl modified nucleotide
  modified_base 39: mod_base = OTHER; note = 2'-O-methyl modified nucleotide
  modified_base 40: mod_base = OTHER; note = 2'-O-methyl modified nucleotide
  modified_base 69: mod_base = OTHER; note = 2'-O-methyl modified nucleotide
  modified_base 70: mod_base = OTHER; note = 2'-O-methyl modified nucleotide
  modified_base 71: mod_base = OTHER; note = 2'-O-methyl modified nucleotide
  modified_base 72: mod_base = OTHER; note = 2'-O-methyl modified nucleotide
  modified_base 73: mod_base = OTHER; note = 2'-O-methyl modified nucleotide
  modified_base 74: mod_base = OTHER; note = 2'-O-methyl modified nucleotide
  modified_base 75: mod_base = OTHER; note = 2'-O-methyl modified nucleotide
  modified_base 76: mod_base = OTHER; note = 2'-O-methyl modified nucleotide
  modified_base 77: mod_base = OTHER; note = 2'-O-methyl modified nucleotide
  modified_base 78: mod_base = OTHER; note = 2'-O-methyl modified nucleotide
  modified_base 79: mod_base = OTHER; note = 2'-O-methyl modified nucleotide
  modified_base 80: mod_base = OTHER; note = 2'-O-methyl modified nucleotide
  modified_base 81: mod_base = OTHER; note = 2'-O-methyl modified nucleotide
  modified_base 82: mod_base = OTHER; note = 2'-O-methyl modified nucleotide
  modified_base 83: mod_base = OTHER; note = 2'-O-methyl modified nucleotide
  modified_base 84: mod_base = OTHER; note = 2'-O-methyl modified nucleotide
  modified_base 85: mod_base = OTHER; note = 2'-O-methyl modified nucleotide
  modified_base 86: mod_base = OTHER; note = 2'-O-methyl modified nucleotide
  modified_base 87: mod_base = OTHER; note = 2'-O-methyl modified nucleotide
  modified_base 88: mod_base = OTHER; note = 2'-O-methyl modified nucleotide
  modified_base 89: mod_base = OTHER; note = 2'-O-methyl modified nucleotide
  modified_base 90: mod_base = OTHER; note = 2'-O-methyl modified nucleotide
  modified_base 91: mod_base = OTHER; note = 2'-O-methyl modified nucleotide
  modified_base 92: mod_base = OTHER; note = 2'-O-methyl modified nucleotide
  modified_base 93: mod_base = OTHER; note = 2'-O-methyl modified nucleotide
  modified_base 94: mod_base = OTHER; note = 2'-O-methyl modified nucleotide
  modified_base 95: mod_base = OTHER; note = 2'-O-methyl modified nucleotide
  modified_base 96: mod_base = OTHER; note = 2'-O-methyl modified nucleotide
  modified_base 124: mod_base = OTHER; note = Nucleotide with phosphorothioate linkage
  modified_base 125: mod_base = OTHER; note = 2'-O-methyl modified nucleotide with phosphorothioate linkage
  modified_base 126: mod_base = OTHER; note = 2'-O-methyl modified nucleotide with phosphorothioate linkage
  modified_base 127: mod_base = OTHER; note = 2'-O-methyl modified nucleotide
gagtagcgcgagcacagctagttttagagctagaaatagcaagttaaaataaggctagtccgttatcaacttgaaaaagtggcaccgagtcggtgctccgtggccttagtaaccctgtgctcgcgct

SEQ ID NO: 17836 - RNA, 126 nt, synthetic construct
  source 1..126: mol_type = other RNA
  modified_base 1: mod_base = OTHER; note = 2'-O-methyl modified nucleotide with phosphorothioate linkage
  modified_base 2: mod_base = OTHER; note = 2'-O-methyl modified nucleotide with phosphorothioate linkage
  modified_base 3: mod_base = OTHER; note = 2'-O-methyl modified nucleotide with phosphorothioate linkage
  modified_base 29: mod_base = OTHER; note = 2'-O-methyl modified nucleotide
  modified_base 30: mod_base = OTHER; note = 2'-O-methyl modified nucleotide
  modified_base 31: mod_base = OTHER; note = 2'-O-methyl modified nucleotide
  modified_base 32: mod_base = OTHER; note = 2'-O-methyl modified nucleotide
  modified_base 33: mod_base = OTHER; note = 2'-O-methyl modified nucleotide
  modified_base 34: mod_base = OTHER; note = 2'-O-methyl modified nucleotide
  modified_base 35: mod_base = OTHER; note = 2'-O-methyl modified nucleotide
  modified_base 36: mod_base = OTHER; note = 2'-O-methyl modified nucleotide
  modified_base 37: mod_base = OTHER; note = 2'-O-methyl modified nucleotide
  modified_base 38: mod_base = OTHER; note = 2'-O-methyl modified nucleotide
  modified_base 39: mod_base = OTHER; note = 2'-O-methyl modified nucleotide
  modified_base 40: mod_base = OTHER; note = 2'-O-methyl modified nucleotide
  modified_base 69: mod_base = OTHER; note = 2'-O-methyl modified nucleotide
  modified_base 70: mod_base = OTHER; note = 2'-O-methyl modified nucleotide
  modified_base 71: mod_base = OTHER; note = 2'-O-methyl modified nucleotide
  modified_base 72: mod_base = OTHER; note = 2'-O-methyl modified nucleotide
  modified_base 73: mod_base = OTHER; note = 2'-O-methyl modified nucleotide
  modified_base 74: mod_base = OTHER; note = 2'-O-methyl modified nucleotide
  modified_base 75: mod_base = OTHER; note = 2'-O-methyl modified nucleotide
  modified_base 76: mod_base = OTHER; note = 2'-O-methyl modified nucleotide
  modified_base 77: mod_base = OTHER; note = 2'-O-methyl modified nucleotide
  modified_base 78: mod_base = OTHER; note = 2'-O-methyl modified nucleotide
  modified_base 79: mod_base = OTHER; note = 2'-O-methyl modified nucleotide
  modified_base 80: mod_base = OTHER; note = 2'-O-methyl modified nucleotide
  modified_base 81: mod_base = OTHER; note = 2'-O-methyl modified nucleotide
  modified_base 82: mod_base = OTHER; note = 2'-O-methyl modified nucleotide
  modified_base 83: mod_base = OTHER; note = 2'-O-methyl modified nucleotide
  modified_base 84: mod_base = OTHER; note = 2'-O-methyl modified nucleotide
  modified_base 85: mod_base = OTHER; note = 2'-O-methyl modified nucleotide
  modified_base 86: mod_base = OTHER; note = 2'-O-methyl modified nucleotide
  modified_base 87: mod_base = OTHER; note = 2'-O-methyl modified nucleotide
  modified_base 88: mod_base = OTHER; note = 2'-O-methyl modified nucleotide
  modified_base 89: mod_base = OTHER; note = 2'-O-methyl modified nucleotide
  modified_base 90: mod_base = OTHER; note = 2'-O-methyl modified nucleotide
  modified_base 91: mod_base = OTHER; note = 2'-O-methyl modified nucleotide
  modified_base 92: mod_base = OTHER; note = 2'-O-methyl modified nucleotide
  modified_base 93: mod_base = OTHER; note = 2'-O-methyl modified nucleotide
  modified_base 94: mod_base = OTHER; note = 2'-O-methyl modified nucleotide
  modified_base 95: mod_base = OTHER; note = 2'-O-methyl modified nucleotide
  modified_base 96: mod_base = OTHER; note = 2'-O-methyl modified nucleotide
  modified_base 123: mod_base = OTHER; note = Nucleotide with phosphorothioate linkage
  modified_base 124: mod_base = OTHER; note = 2'-O-methyl modified nucleotide with phosphorothioate linkage
  modified_base 125: mod_base = OTHER; note = 2'-O-methyl modified nucleotide with phosphorothioate linkage
  modified_base 126: mod_base = OTHER; note = 2'-O-methyl modified nucleotide
gagtagcgcgagcacagctagttttagagctagaaatagcaagttaaaataaggctagtccgttatcaacttgaaaaagtggcaccgagtcggtgctccgtggccttagtaaccctgtgctcgcgc

SEQ ID NO: 17837 - RNA, 125 nt, synthetic construct
  source 1..125: mol_type = other RNA
  modified_base 1: mod_base = OTHER; note = 2'-O-methyl modified nucleotide with phosphorothioate linkage
  modified_base 2: mod_base = OTHER; note = 2'-O-methyl modified nucleotide with phosphorothioate linkage
  modified_base 3: mod_base = OTHER; note = 2'-O-methyl modified nucleotide with phosphorothioate linkage
  modified_base 29: mod_base = OTHER; note = 2'-O-methyl modified nucleotide
  modified_base 30: mod_base = OTHER; note = 2'-O-methyl modified nucleotide
  modified_base 31: mod_base = OTHER; note = 2'-O-methyl modified nucleotide
  modified_base 32: mod_base = OTHER; note = 2'-O-methyl modified nucleotide
  modified_base 33: mod_base = OTHER; note = 2'-O-methyl modified nucleotide
  modified_base 34: mod_base = OTHER; note = 2'-O-methyl modified nucleotide
  modified_base 35: mod_base = OTHER; note = 2'-O-methyl modified nucleotide
  modified_base 36: mod_base = OTHER; note = 2'-O-methyl modified nucleotide
  modified_base 37: mod_base = OTHER; note = 2'-O-methyl modified nucleotide
  modified_base 38: mod_base = OTHER; note = 2'-O-methyl modified nucleotide
  modified_base 39: mod_base = OTHER; note = 2'-O-methyl modified nucleotide
  modified_base 40: mod_base = OTHER; note = 2'-O-methyl modified nucleotide
  modified_base 69: mod_base = OTHER; note = 2'-O-methyl modified nucleotide
  modified_base 70: mod_base = OTHER; note = 2'-O-methyl modified nucleotide
  modified_base 71: mod_base = OTHER; note = 2'-O-methyl modified nucleotide
  modified_base 72: mod_base = OTHER; note = 2'-O-methyl modified nucleotide
  modified_base 73: mod_base = OTHER; note = 2'-O-methyl modified nucleotide
  modified_base 74: mod_base = OTHER; note = 2'-O-methyl modified nucleotide
  modified_base 75: mod_base = OTHER; note = 2'-O-methyl modified nucleotide
  modified_base 76: mod_base = OTHER; note = 2'-O-methyl modified nucleotide
  modified_base 77: mod_base = OTHER; note = 2'-O-methyl modified nucleotide
  modified_base 78: mod_base = OTHER; note = 2'-O-methyl modified nucleotide
  modified_base 79: mod_base = OTHER; note = 2'-O-methyl modified nucleotide
  modified_base 80: mod_base = OTHER; note = 2'-O-methyl modified nucleotide
  modified_base 81: mod_base = OTHER; note = 2'-O-methyl modified nucleotide
  modified_base 82: mod_base = OTHER; note = 2'-O-methyl modified nucleotide
  modified_base 83: mod_base = OTHER; note = 2'-O-methyl modified nucleotide
  modified_base 84: mod_base = OTHER; note = 2'-O-methyl modified nucleotide
  modified_base 85: mod_base = OTHER; note = 2'-O-methyl modified nucleotide
  modified_base 86: mod_base = OTHER; note = 2'-O-methyl modified nucleotide
  modified_base 87: mod_base = OTHER; note = 2'-O-methyl modified nucleotide
  modified_base 88: mod_base = OTHER; note = 2'-O-methyl modified nucleotide
  modified_base 89: mod_base = OTHER; note = 2'-O-methyl modified nucleotide
  modified_base 90: mod_base = OTHER; note = 2'-O-methyl modified nucleotide
  modified_base 91: mod_base = OTHER; note = 2'-O-methyl modified nucleotide
  modified_base 92: mod_base = OTHER; note = 2'-O-methyl modified nucleotide
  modified_base 93: mod_base = OTHER; note = 2'-O-methyl modified nucleotide
  modified_base 94: mod_base = OTHER; note = 2'-O-methyl modified nucleotide
  modified_base 95: mod_base = OTHER; note = 2'-O-methyl modified nucleotide
  modified_base 96: mod_base = OTHER; note = 2'-O-methyl modified nucleotide
  modified_base 122: mod_base = OTHER; note = Nucleotide with phosphorothioate linkage
  modified_base 123: mod_base = OTHER; note = 2'-O-methyl modified nucleotide with phosphorothioate linkage
  modified_base 124: mod_base = OTHER; note = 2'-O-methyl modified nucleotide with phosphorothioate linkage
  modified_base 125: mod_base = OTHER; note = 2'-O-methyl modified nucleotide
gagtagcgcgagcacagctagttttagagctagaaatagcaagttaaaataaggctagtccgttatcaacttgaaaaagtggcaccgagtcggtgctccgtggccttagtaaccctgtgctcgcg

SEQ ID NO: 17838 - RNA, 124 nt, synthetic construct
  source 1..124: mol_type = other RNA
  modified_base 1: mod_base = OTHER; note = 2'-O-methyl modified nucleotide with phosphorothioate linkage
  modified_base 2: mod_base = OTHER; note = 2'-O-methyl modified nucleotide with phosphorothioate linkage
  modified_base 3: mod_base = OTHER; note = 2'-O-methyl modified nucleotide with phosphorothioate linkage
  modified_base 29: mod_base = OTHER; note = 2'-O-methyl modified nucleotide
  modified_base 30: mod_base = OTHER; note = 2'-O-methyl modified nucleotide
  modified_base 31: mod_base = OTHER; note = 2'-O-methyl modified nucleotide
  modified_base 32: mod_base = OTHER; note = 2'-O-methyl modified nucleotide
  modified_base 33: mod_base = OTHER; note = 2'-O-methyl modified nucleotide
  modified_base 34: mod_base = OTHER; note = 2'-O-methyl modified nucleotide
  modified_base 35: mod_base = OTHER; note = 2'-O-methyl modified nucleotide
  modified_base 36: mod_base = OTHER; note = 2'-O-methyl modified nucleotide
  modified_base 37: mod_base = OTHER; note = 2'-O-methyl modified nucleotide
  modified_base 38: mod_base = OTHER; note = 2'-O-methyl modified nucleotide
  modified_base 39: mod_base = OTHER; note = 2'-O-methyl modified nucleotide
  modified_base 40: mod_base = OTHER; note = 2'-O-methyl modified nucleotide
  modified_base 69: mod_base = OTHER; note = 2'-O-methyl modified nucleotide
  modified_base 70: mod_base = OTHER; note = 2'-O-methyl modified nucleotide
  modified_base 71: mod_base = OTHER; note = 2'-O-methyl modified nucleotide
  modified_base 72: mod_base = OTHER; note = 2'-O-methyl modified nucleotide
  modified_base 73: mod_base = OTHER; note = 2'-O-methyl modified nucleotide
  modified_base 74: mod_base = OTHER; note = 2'-O-methyl modified nucleotide
  modified_base 75: mod_base = OTHER; note = 2'-O-methyl modified nucleotide
  modified_base 76: mod_base = OTHER; note = 2'-O-methyl modified nucleotide
  modified_base 77: mod_base = OTHER; note = 2'-O-methyl modified nucleotide
  modified_base 78: mod_base = OTHER; note = 2'-O-methyl modified nucleotide
  modified_base 79: mod_base = OTHER; note = 2'-O-methyl modified nucleotide
  modified_base 80: mod_base = OTHER; note = 2'-O-methyl modified nucleotide
  modified_base 81: mod_base = OTHER; note = 2'-O-methyl modified nucleotide
  modified_base 82: mod_base = OTHER; note = 2'-O-methyl modified nucleotide
  modified_base 83: mod_base = OTHER; note = 2'-O-methyl modified nucleotide
  modified_base 84: mod_base = OTHER; note = 2'-O-methyl modified nucleotide
  modified_base 85: mod_base = OTHER; note = 2'-O-methyl modified nucleotide
  modified_base 86: mod_base = OTHER; note = 2'-O-methyl modified nucleotide
  modified_base 87: mod_base = OTHER; note = 2'-O-methyl modified nucleotide
  modified_base 88: mod_base = OTHER; note = 2'-O-methyl modified nucleotide
  modified_base 89: mod_base = OTHER; note = 2'-O-methyl modified nucleotide
  modified_base 90: mod_base = OTHER; note = 2'-O-methyl modified nucleotide
  modified_base 91: mod_base = OTHER; note = 2'-O-methyl modified nucleotide
  modified_base 92: mod_base = OTHER; note = 2'-O-methyl modified nucleotide
  modified_base 93: mod_base = OTHER; note = 2'-O-methyl modified nucleotide
  modified_base 94: mod_base = OTHER; note = 2'-O-methyl modified nucleotide
  modified_base 95: mod_base = OTHER; note = 2'-O-methyl modified nucleotide
  modified_base 96: mod_base = OTHER; note = 2'-O-methyl modified nucleotide
  modified_base 121: mod_base = OTHER; note = Nucleotide with phosphorothioate linkage
  modified_base 122: mod_base = OTHER; note = 2'-O-methyl modified nucleotide with phosphorothioate linkage
  modified_base 123: mod_base = OTHER; note = 2'-O-methyl modified nucleotide with phosphorothioate linkage
  modified_base 124: mod_base = OTHER; note = 2'-O-methyl modified nucleotide
gagtagcgcgagcacagctagttttagagctagaaatagcaagttaaaataaggctagtccgttatcaacttgaaaaagtggcaccgagtcggtgctccgtggccttagtaaccctgtgctcgc

SEQ ID NO: 17839 - RNA, 123 nt, synthetic construct
  source 1..123: mol_type = other RNA
  modified_base 1: mod_base = OTHER; note = 2'-O-methyl modified nucleotide with phosphorothioate linkage
  modified_base 2: mod_base = OTHER; note = 2'-O-methyl modified nucleotide with phosphorothioate linkage
  modified_base 3: mod_base = OTHER; note = 2'-O-methyl modified nucleotide with phosphorothioate linkage
  modified_base 29: mod_base = OTHER; note = 2'-O-methyl modified nucleotide
  modified_base 30: mod_base = OTHER; note = 2'-O-methyl modified nucleotide
  modified_base 31: mod_base = OTHER; note = 2'-O-methyl modified nucleotide
  modified_base 32: mod_base = OTHER; note = 2'-O-methyl modified nucleotide
  modified_base 33: mod_base = OTHER; note = 2'-O-methyl modified nucleotide
  modified_base 34: mod_base = OTHER; note = 2'-O-methyl modified nucleotide
  modified_base 35: mod_base = OTHER; note = 2'-O-methyl modified nucleotide
  modified_base 36: mod_base = OTHER; note = 2'-O-methyl modified nucleotide
  modified_base 37: mod_base = OTHER; note = 2'-O-methyl modified nucleotide
  modified_base 38: mod_base = OTHER; note = 2'-O-methyl modified nucleotide
  modified_base 39: mod_base = OTHER; note = 2'-O-methyl modified nucleotide
  modified_base 40: mod_base = OTHER; note = 2'-O-methyl modified nucleotide
  modified_base 69: mod_base = OTHER; note = 2'-O-methyl modified nucleotide
  modified_base 70: mod_base = OTHER; note = 2'-O-methyl modified nucleotide
  modified_base 71: mod_base = OTHER; note = 2'-O-methyl modified nucleotide
  modified_base 72: mod_base = OTHER; note = 2'-O-methyl modified nucleotide
  modified_base 73: mod_base = OTHER; note = 2'-O-methyl modified nucleotide
  modified_base 74: mod_base = OTHER; note = 2'-O-methyl modified nucleotide
  modified_base 75: mod_base = OTHER; note = 2'-O-methyl modified nucleotide
  modified_base 76: mod_base = OTHER; note = 2'-O-methyl modified nucleotide
  modified_base 77: mod_base = OTHER; note = 2'-O-methyl modified nucleotide
  modified_base 78: mod_base = OTHER; note = 2'-O-methyl modified nucleotide
  modified_base 79: mod_base = OTHER; note = 2'-O-methyl modified nucleotide
  modified_base 80: mod_base = OTHER; note = 2'-O-methyl modified nucleotide
  modified_base 81: mod_base = OTHER; note = 2'-O-methyl modified nucleotide
  modified_base 82: mod_base = OTHER; note = 2'-O-methyl modified nucleotide
  modified_base 83: mod_base = OTHER; note = 2'-O-methyl modified nucleotide
  modified_base 84: mod_base = OTHER; note = 2'-O-methyl modified nucleotide
  modified_base 85: mod_base = OTHER; note = 2'-O-methyl modified nucleotide
  modified_base 86: mod_base = OTHER; note = 2'-O-methyl modified nucleotide
  modified_base 87: mod_base = OTHER; note = 2'-O-methyl modified nucleotide
  modified_base 88: mod_base = OTHER; note = 2'-O-methyl modified nucleotide
  modified_base 89: mod_base = OTHER; note = 2'-O-methyl modified nucleotide
  modified_base 90: mod_base = OTHER; note = 2'-O-methyl modified nucleotide
  modified_base 91: mod_base = OTHER; note = 2'-O-methyl modified nucleotide
  modified_base 92: mod_base = OTHER; note = 2'-O-methyl modified nucleotide
  modified_base 93: mod_base = OTHER; note = 2'-O-methyl modified nucleotide
  modified_base 94: mod_base = OTHER; note = 2'-O-methyl modified nucleotide
  modified_base 95: mod_base = OTHER; note = 2'-O-methyl modified nucleotide
  modified_base 96: mod_base = OTHER; note = 2'-O-methyl modified nucleotide
  modified_base 120: mod_base = OTHER; note = Nucleotide with phosphorothioate linkage
  modified_base 121: mod_base = OTHER; note = 2'-O-methyl modified nucleotide with phosphorothioate linkage
  modified_base 122: mod_base = OTHER; note = 2'-O-methyl modified nucleotide with phosphorothioate linkage
  modified_base 123: mod_base = OTHER; note = 2'-O-methyl modified nucleotide
gagtagcgcgagcacagctagttttagagctagaaatagcaagttaaaataaggctagtccgttatcaacttgaaaaagtggcaccgagtcggtgctccgtggccttagtaaccctgtgctcg

SEQ ID NO: 17840 - RNA, 122 nt, synthetic construct
  source 1..122: mol_type = other RNA
  modified_base 1: mod_base = OTHER; note = 2'-O-methyl modified nucleotide with phosphorothioate linkage
  modified_base 2: mod_base = OTHER; note = 2'-O-methyl modified nucleotide with phosphorothioate linkage
  modified_base 3: mod_base = OTHER; note = 2'-O-methyl modified nucleotide with phosphorothioate linkage
  modified_base 29: mod_base = OTHER; note = 2'-O-methyl modified nucleotide
  modified_base 30: mod_base = OTHER; note = 2'-O-methyl modified nucleotide
  modified_base 31: mod_base = OTHER; note = 2'-O-methyl modified nucleotide
  modified_base 32: mod_base = OTHER; note = 2'-O-methyl modified nucleotide
  modified_base 33: mod_base = OTHER; note = 2'-O-methyl modified nucleotide
  modified_base 34: mod_base = OTHER; note = 2'-O-methyl modified nucleotide
  modified_base 35: mod_base = OTHER; note = 2'-O-methyl modified nucleotide
  modified_base 36: mod_base = OTHER; note = 2'-O-methyl modified nucleotide
  modified_base 37: mod_base = OTHER; note = 2'-O-methyl modified nucleotide
  modified_base 38: mod_base = OTHER; note = 2'-O-methyl modified nucleotide
  modified_base 39: mod_base = OTHER; note = 2'-O-methyl modified nucleotide
  modified_base 40: mod_base = OTHER; note = 2'-O-methyl modified nucleotide
  modified_base 69: mod_base = OTHER; note = 2'-O-methyl modified nucleotide
  modified_base 70: mod_base = OTHER; note = 2'-O-methyl modified nucleotide
  modified_base 71: mod_base = OTHER; note = 2'-O-methyl modified nucleotide
  modified_base 72: mod_base = OTHER; note = 2'-O-methyl modified nucleotide
  modified_base 73: mod_base = OTHER; note = 2'-O-methyl modified nucleotide
  modified_base 74: mod_base = OTHER; note = 2'-O-methyl modified nucleotide
  modified_base 75: mod_base = OTHER; note = 2'-O-methyl modified nucleotide
  modified_base 76: mod_base = OTHER; note = 2'-O-methyl modified nucleotide
  modified_base 77: mod_base = OTHER; note = 2'-O-methyl modified nucleotide
  modified_base 78: mod_base = OTHER; note = 2'-O-methyl modified nucleotide
  modified_base 79: mod_base = OTHER; note = 2'-O-methyl modified nucleotide
  modified_base 80: mod_base = OTHER; note = 2'-O-methyl modified nucleotide
  modified_base 81: mod_base = OTHER; note = 2'-O-methyl modified nucleotide
  modified_base 82: mod_base = OTHER; note = 2'-O-methyl modified nucleotide
  modified_base 83: mod_base = OTHER; note = 2'-O-methyl modified nucleotide
  modified_base 84: mod_base = OTHER; note = 2'-O-methyl modified nucleotide
  modified_base 85: mod_base = OTHER; note = 2'-O-methyl modified nucleotide
  modified_base 86: mod_base = OTHER; note = 2'-O-methyl modified nucleotide
  modified_base 87: mod_base = OTHER; note = 2'-O-methyl modified nucleotide
  modified_base 88: mod_base = OTHER; note = 2'-O-methyl modified nucleotide
  modified_base 89: mod_base = OTHER; note = 2'-O-methyl modified nucleotide
  modified_base 90: mod_base = OTHER; note = 2'-O-methyl modified nucleotide
  modified_base 91: mod_base = OTHER; note = 2'-O-methyl modified nucleotide
  modified_base 92: mod_base = OTHER; note = 2'-O-methyl modified nucleotide
  modified_base 93: mod_base = OTHER; note = 2'-O-methyl modified nucleotide
  modified_base 94: mod_base = OTHER; note = 2'-O-methyl modified nucleotide
  modified_base 95: mod_base = OTHER; note = 2'-O-methyl modified nucleotide
  modified_base 96: mod_base = OTHER; note = 2'-O-methyl modified nucleotide
  modified_base 119: mod_base = OTHER; note = Nucleotide with phosphorothioate linkage
  modified_base 120: mod_base = OTHER; note = 2'-O-methyl modified nucleotide with phosphorothioate linkage
  modified_base 121: mod_base = OTHER; note = 2'-O-methyl modified nucleotide with phosphorothioate linkage
  modified_base 122: mod_base = OTHER; note = 2'-O-methyl modified nucleotide
gagtagcgcgagcacagctagttttagagctagaaatagcaagttaaaataaggctagtccgttatcaacttgaaaaagtggcaccgagtcggtgctccgtggccttagtaaccctgtgctc

SEQ ID NO: 17841 - RNA, 129 nt, synthetic construct
  source 1..129: mol_type = other RNA
  modified_base 1: mod_base = OTHER; note = 2'-O-methyl modified nucleotide with phosphorothioate linkage
  modified_base 2: mod_base = OTHER; note = 2'-O-methyl modified nucleotide with phosphorothioate linkage
  modified_base 3: mod_base = OTHER; note = 2'-O-methyl modified nucleotide with phosphorothioate linkage
  modified_base 29: mod_base = OTHER; note = 2'-O-methyl modified nucleotide
  modified_base 30: mod_base = OTHER; note = 2'-O-methyl modified nucleotide
  modified_base 31: mod_base = OTHER; note = 2'-O-methyl modified nucleotide
  modified_base 32: mod_base = OTHER; note = 2'-O-methyl modified nucleotide
  modified_base 33: mod_base = OTHER; note = 2'-O-methyl modified nucleotide
  modified_base 34: mod_base = OTHER; note = 2'-O-methyl modified nucleotide
  modified_base 35: mod_base = OTHER; note = 2'-O-methyl modified nucleotide
  modified_base 36: mod_base = OTHER; note = 2'-O-methyl modified nucleotide
  modified_base 37: mod_base = OTHER; note = 2'-O-methyl modified nucleotide
  modified_base 38: mod_base = OTHER; note = 2'-O-methyl modified nucleotide
  modified_base 39: mod_base = OTHER; note = 2'-O-methyl modified nucleotide
  modified_base 40: mod_base = OTHER; note = 2'-O-methyl modified nucleotide
  modified_base 69: mod_base = OTHER; note = 2'-O-methyl modified nucleotide
  modified_base 70: mod_base = OTHER; note = 2'-O-methyl modified nucleotide
  modified_base 71: mod_base = OTHER; note = 2'-O-methyl modified nucleotide
  modified_base 72: mod_base = OTHER; note = 2'-O-methyl modified nucleotide
  modified_base 73: mod_base = OTHER; note = 2'-O-methyl modified nucleotide
  modified_base 74: mod_base = OTHER; note = 2'-O-methyl modified nucleotide
  modified_base 75: mod_base = OTHER; note = 2'-O-methyl modified nucleotide
  modified_base 76: mod_base = OTHER; note = 2'-O-methyl modified nucleotide
  modified_base 77: mod_base = OTHER; note = 2'-O-methyl modified nucleotide
  modified_base 78: mod_base = OTHER; note = 2'-O-methyl modified nucleotide
  modified_base 79: mod_base = OTHER; note = 2'-O-methyl modified nucleotide
  modified_base 80: mod_base = OTHER; note = 2'-O-methyl modified nucleotide
  modified_base 81: mod_base = OTHER; note = 2'-O-methyl modified nucleotide
  modified_base 82: mod_base = OTHER; note = 2'-O-methyl modified nucleotide
  modified_base 83: mod_base = OTHER; note = 2'-O-methyl modified nucleotide
  modified_base 84: mod_base = OTHER; note = 2'-O-methyl modified nucleotide
  modified_base 85: mod_base = OTHER; note = 2'-O-methyl modified nucleotide
  modified_base 86: mod_base = OTHER; note = 2'-O-methyl modified nucleotide
  modified_base 87: mod_base = OTHER; note = 2'-O-methyl modified nucleotide
  modified_base 88: mod_base = OTHER; note = 2'-O-methyl modified nucleotide
  modified_base 89: mod_base = OTHER; note = 2'-O-methyl modified nucleotide
  modified_base 90: mod_base = OTHER; note = 2'-O-methyl modified nucleotide
  modified_base 91: mod_base = OTHER; note = 2'-O-methyl modified nucleotide
  modified_base 92: mod_base = OTHER; note = 2'-O-methyl modified nucleotide
  modified_base 93: mod_base = OTHER; note = 2'-O-methyl modified nucleotide
  modified_base 94: mod_base = OTHER; note = 2'-O-methyl modified nucleotide
  modified_base 95: mod_base = OTHER; note = 2'-O-methyl modified nucleotide
  modified_base 96: mod_base = OTHER; note = 2'-O-methyl modified nucleotide
  modified_base 126: mod_base = OTHER; note = Nucleotide with phosphorothioate linkage
  modified_base 127: mod_base = OTHER; note = 2'-O-methyl modified nucleotide with phosphorothioate linkage
  modified_base 128: mod_base = OTHER; note = 2'-O-methyl modified nucleotide with phosphorothioate linkage
  modified_base 129: mod_base = OTHER; note = 2'-O-methyl modified nucleotide
gagtagcgcgagcacagctagttttagagctagaaatagcaagttaaaataaggctagtccgttatcaacttgaaaaagtggcaccgagtcggtgcgctccgtggccttagtaaccctgtgctcgcgct

SEQ ID NO: 17842 - RNA, 128 nt, synthetic construct
  source 1..128: mol_type = other RNA
  modified_base 1: mod_base = OTHER; note = 2'-O-methyl modified nucleotide with phosphorothioate linkage
  modified_base 2: mod_base = OTHER; note = 2'-O-methyl modified nucleotide with phosphorothioate linkage
  modified_base 3: mod_base = OTHER; note = 2'-O-methyl modified nucleotide with phosphorothioate linkage
  modified_base 29: mod_base = OTHER; note = 2'-O-methyl modified nucleotide
  modified_base 30: mod_base = OTHER; note = 2'-O-methyl modified nucleotide
  modified_base 31: mod_base = OTHER; note = 2'-O-methyl modified nucleotide
  modified_base 32: mod_base = OTHER; note = 2'-O-methyl modified nucleotide
  modified_base 33: mod_base = OTHER; note = 2'-O-methyl modified nucleotide
  modified_base 34: mod_base = OTHER; note = 2'-O-methyl modified nucleotide
  modified_base 35: mod_base = OTHER; note = 2'-O-methyl modified nucleotide
  modified_base 36: mod_base = OTHER; note = 2'-O-methyl modified nucleotide
  modified_base 37: mod_base = OTHER; note = 2'-O-methyl modified nucleotide
  modified_base 38: mod_base = OTHER; note = 2'-O-methyl modified nucleotide
  modified_base 39: mod_base = OTHER; note = 2'-O-methyl modified nucleotide
  modified_base 40: mod_base = OTHER; note = 2'-O-methyl modified nucleotide
  modified_base 69: mod_base = OTHER; note = 2'-O-methyl modified nucleotide
  modified_base 70: mod_base = OTHER; note = 2'-O-methyl modified nucleotide
  modified_base 71: mod_base = OTHER; note = 2'-O-methyl modified nucleotide
  modified_base 72: mod_base = OTHER; note = 2'-O-methyl modified nucleotide
  modified_base 73: mod_base = OTHER; note = 2'-O-methyl modified nucleotide
  modified_base 74: mod_base = OTHER; note = 2'-O-methyl modified nucleotide
  modified_base 75: mod_base = OTHER; note = 2'-O-methyl modified nucleotide
  modified_base 76: mod_base = OTHER; note = 2'-O-methyl modified nucleotide
  modified_base 77: mod_base = OTHER; note = 2'-O-methyl modified nucleotide
  modified_base 78: mod_base = OTHER; note = 2'-O-methyl modified nucleotide
  modified_base 79: mod_base = OTHER; note = 2'-O-methyl modified nucleotide
  modified_base 80: mod_base = OTHER; note = 2'-O-methyl modified nucleotide
  modified_base 81: mod_base = OTHER; note = 2'-O-methyl modified nucleotide
  modified_base 82: mod_base = OTHER; note = 2'-O-methyl modified nucleotide
  modified_base 83: mod_base = OTHER; note = 2'-O-methyl modified nucleotide
  modified_base 84: mod_base = OTHER; note = 2'-O-methyl modified nucleotide
  modified_base 85: mod_base = OTHER; note = 2'-O-methyl modified nucleotide
  modified_base 86: mod_base = OTHER; note = 2'-O-methyl modified nucleotide
  modified_base 87: mod_base = OTHER; note = 2'-O-methyl modified nucleotide
  modified_base 88: mod_base = OTHER; note = 2'-O-methyl modified nucleotide
  modified_base 89: mod_base = OTHER; note = 2'-O-methyl modified nucleotide
  modified_base 90: mod_base = OTHER; note = 2'-O-methyl modified nucleotide
  modified_base 91: mod_base = OTHER; note = 2'-O-methyl modified nucleotide
  modified_base 92: mod_base = OTHER; note = 2'-O-methyl modified nucleotide
  modified_base 93: mod_base = OTHER; note = 2'-O-methyl modified nucleotide
  modified_base 94: mod_base = OTHER; note = 2'-O-methyl modified nucleotide
  modified_base 95: mod_base = OTHER; note = 2'-O-methyl modified nucleotide
  modified_base 96: mod_base = OTHER; note = 2'-O-methyl modified nucleotide
  modified_base 125: mod_base = OTHER; note = Nucleotide with phosphorothioate linkage
  modified_base 126: mod_base = OTHER; note = 2'-O-methyl modified nucleotide with phosphorothioate linkage
  modified_base 127: mod_base = OTHER; note = 2'-O-methyl modified nucleotide with phosphorothioate linkage
  modified_base 128: mod_base = OTHER; note = 2'-O-methyl modified nucleotide
gagtagcgcgagcacagctagttttagagctagaaatagcaagttaaaataaggctagtccgttatcaacttgaaaaagtggcaccgagtcggtgcgctccgtggccttagtaaccctgtgctcgcgc

SEQ ID NO: 17843 - RNA, 127 nt, synthetic construct
  source 1..127: mol_type = other RNA
  modified_base 1: mod_base = OTHER; note = 2'-O-methyl modified nucleotide with phosphorothioate linkage
  modified_base 2: mod_base = OTHER; note = 2'-O-methyl modified nucleotide with phosphorothioate linkage
  modified_base 3: mod_base = OTHER; note = 2'-O-methyl modified nucleotide with phosphorothioate linkage
  modified_base 29: mod_base = OTHER; note = 2'-O-methyl modified nucleotide
  modified_base 30: mod_base = OTHER; note = 2'-O-methyl modified nucleotide
  modified_base 31: mod_base = OTHER; note = 2'-O-methyl modified nucleotide
  modified_base 32: mod_base = OTHER; note = 2'-O-methyl modified nucleotide
  modified_base 33: mod_base = OTHER; note = 2'-O-methyl modified nucleotide
  modified_base 34: mod_base = OTHER; note = 2'-O-methyl modified nucleotide
  modified_base 35: mod_base = OTHER; note = 2'-O-methyl modified nucleotide
  modified_base 36: mod_base = OTHER; note = 2'-O-methyl modified nucleotide
  modified_base 37: mod_base = OTHER; note = 2'-O-methyl modified nucleotide
  modified_base 38: mod_base = OTHER; note = 2'-O-methyl modified nucleotide
  modified_base 39: mod_base = OTHER; note = 2'-O-methyl modified nucleotide
  modified_base 40: mod_base = OTHER; note = 2'-O-methyl modified nucleotide
  modified_base 69: mod_base = OTHER; note = 2'-O-methyl modified nucleotide
  modified_base 70: mod_base = OTHER; note = 2'-O-methyl modified nucleotide
  modified_base 71: mod_base = OTHER; note = 2'-O-methyl modified nucleotide
  modified_base 72: mod_base = OTHER; note = 2'-O-methyl modified nucleotide
  modified_base 73: mod_base = OTHER; note = 2'-O-methyl modified nucleotide
  modified_base 74: mod_base = OTHER; note = 2'-O-methyl modified nucleotide
  modified_base 75: mod_base = OTHER; note = 2'-O-methyl modified nucleotide
  modified_base 76: mod_base = OTHER; note = 2'-O-methyl modified nucleotide
  modified_base 77: mod_base = OTHER; note = 2'-O-methyl modified nucleotide
  modified_base 78: mod_base = OTHER; note = 2'-O-methyl modified nucleotide
  modified_base 79: mod_base = OTHER; note = 2'-O-methyl modified nucleotide
  modified_base 80: mod_base = OTHER; note = 2'-O-methyl modified nucleotide
  modified_base 81: mod_base = OTHER; note = 2'-O-methyl modified nucleotide
  modified_base 82: mod_base = OTHER; note = 2'-O-methyl modified nucleotide
  modified_base 83: mod_base = OTHER; note = 2'-O-methyl modified nucleotide
  modified_base 84: mod_base = OTHER; note = 2'-O-methyl modified nucleotide
  modified_base 85: mod_base = OTHER; note = 2'-O-methyl modified nucleotide
  modified_base 86: mod_base = OTHER; note = 2'-O-methyl modified nucleotide
  modified_base 87: mod_base = OTHER; note = 2'-O-methyl modified nucleotide
  modified_base 88: mod_base = OTHER; note = 2'-O-methyl modified nucleotide
  modified_base 89: mod_base = OTHER; note = 2'-O-methyl modified nucleotide
  modified_base 90: mod_base = OTHER; note = 2'-O-methyl modified nucleotide
  modified_base 91: mod_base = OTHER; note = 2'-O-methyl modified nucleotide
  modified_base 92: mod_base = OTHER; note = 2'-O-methyl modified nucleotide
  modified_base 93: mod_base = OTHER; note = 2'-O-methyl modified nucleotide
  modified_base 94: mod_base = OTHER; note = 2'-O-methyl modified nucleotide
  modified_base 95: mod_base = OTHER; note = 2'-O-methyl modified nucleotide
  modified_base 96: mod_base = OTHER; note = 2'-O-methyl modified nucleotide
  modified_base 124: mod_base = OTHER; note = Nucleotide with phosphorothioate linkage
  modified_base 125: mod_base = OTHER; note = 2'-O-methyl modified nucleotide with phosphorothioate linkage
  modified_base 126: mod_base = OTHER; note = 2'-O-methyl modified nucleotide with phosphorothioate linkage
  modified_base 127: mod_base = OTHER; note = 2'-O-methyl modified nucleotide
gagtagcgcgagcacagctagttttagagctagaaatagcaagttaaaataaggctagtccgttatcaacttgaaaaagtggcaccgagtcggtgcgctccgtggccttagtaaccctgtgctcgcg

SEQ ID NO: 17844 - RNA, 126 nt, synthetic construct
  source 1..126: mol_type = other RNA
  modified_base 1: mod_base = OTHER; note = 2'-O-methyl modified nucleotide with phosphorothioate linkage
  modified_base 2: mod_base = OTHER; note = 2'-O-methyl modified nucleotide with phosphorothioate linkage
  modified_base 3: mod_base = OTHER; note = 2'-O-methyl modified nucleotide with phosphorothioate linkage
  modified_base 29: mod_base = OTHER; note = 2'-O-methyl modified nucleotide
  modified_base 30: mod_base = OTHER; note = 2'-O-methyl modified nucleotide
  modified_base 31: mod_base = OTHER; note = 2'-O-methyl modified nucleotide
  modified_base 32: mod_base = OTHER; note = 2'-O-methyl modified nucleotide
  modified_base 33: mod_base = OTHER; note = 2'-O-methyl modified nucleotide
  modified_base 34: mod_base = OTHER; note = 2'-O-methyl modified nucleotide
  modified_base 35: mod_base = OTHER; note = 2'-O-methyl modified nucleotide
  modified_base 36: mod_base = OTHER; note = 2'-O-methyl modified nucleotide
  modified_base 37: mod_base = OTHER; note = 2'-O-methyl modified nucleotide
  modified_base 38: mod_base = OTHER; note = 2'-O-methyl modified nucleotide
  modified_base 39: mod_base = OTHER; note = 2'-O-methyl modified nucleotide
  modified_base 40: mod_base = OTHER; note = 2'-O-methyl modified nucleotide
  modified_base 69: mod_base = OTHER; note = 2'-O-methyl modified nucleotide
  modified_base 70: mod_base = OTHER; note = 2'-O-methyl modified nucleotide
  modified_base 71: mod_base = OTHER; note = 2'-O-methyl modified nucleotide
  modified_base 72: mod_base = OTHER; note = 2'-O-methyl modified nucleotide
  modified_base 73: mod_base = OTHER; note = 2'-O-methyl modified nucleotide
  modified_base 74: mod_base = OTHER; note = 2'-O-methyl modified nucleotide
  modified_base 75: mod_base = OTHER; note = 2'-O-methyl modified nucleotide
  modified_base 76: mod_base = OTHER; note = 2'-O-methyl modified nucleotide
  modified_base 77: mod_base = OTHER; note = 2'-O-methyl modified nucleotide
  modified_base 78: mod_base = OTHER; note = 2'-O-methyl modified nucleotide
  modified_base 79: mod_base = OTHER; note = 2'-O-methyl modified nucleotide
  modified_base 80: mod_base = OTHER; note = 2'-O-methyl modified nucleotide
  modified_base 81: mod_base = OTHER; note = 2'-O-methyl modified nucleotide
  modified_base 82: mod_base = OTHER; note = 2'-O-methyl modified nucleotide
  modified_base 83: mod_base = OTHER; note = 2'-O-methyl modified nucleotide
  modified_base 84: mod_base = OTHER; note = 2'-O-methyl modified nucleotide
  modified_base 85: mod_base = OTHER; note = 2'-O-methyl modified nucleotide
  modified_base 86: mod_base = OTHER; note = 2'-O-methyl modified nucleotide
  modified_base 87: mod_base = OTHER; note = 2'-O-methyl modified nucleotide
  modified_base 88: mod_base = OTHER; note = 2'-O-methyl modified nucleotide
  modified_base 89: mod_base = OTHER; note = 2'-O-methyl modified nucleotide
  modified_base 90: mod_base = OTHER; note = 2'-O-methyl modified nucleotide
  modified_base 91: mod_base = OTHER; note = 2'-O-methyl modified nucleotide
  modified_base 92: mod_base = OTHER; note = 2'-O-methyl modified nucleotide
  modified_base 93: mod_base = OTHER; note = 2'-O-methyl modified nucleotide
  modified_base 94: mod_base = OTHER; note = 2'-O-methyl modified nucleotide
  modified_base 95: mod_base = OTHER; note = 2'-O-methyl modified nucleotide
  modified_base 96: mod_base = OTHER; note = 2'-O-methyl modified nucleotide
  modified_base 123: mod_base = OTHER; note = Nucleotide with phosphorothioate linkage
  modified_base 124: mod_base = OTHER; note = 2'-O-methyl modified nucleotide with phosphorothioate linkage
  modified_base 125: mod_base = OTHER; note = 2'-O-methyl modified nucleotide with phosphorothioate linkage
  modified_base 126: mod_base = OTHER; note = 2'-O-methyl modified nucleotide
gagtagcgcgagcacagctagttttagagctagaaatagcaagttaaaataaggctagtccgttatcaacttgaaaaagtggcaccgagtcggtgcgctccgtggccttagtaaccctgtgctcgc

SEQ ID NO: 17845 - RNA, 125 nt, synthetic construct
  source 1..125: mol_type = other RNA
  modified_base 1: mod_base = OTHER; note = 2'-O-methyl modified nucleotide with phosphorothioate linkage
  modified_base 2: mod_base = OTHER; note = 2'-O-methyl modified nucleotide with phosphorothioate linkage
  modified_base 3: mod_base = OTHER; note = 2'-O-methyl modified nucleotide with phosphorothioate linkage
  modified_base 29: mod_base = OTHER; note = 2'-O-methyl modified nucleotide
  modified_base 30: mod_base = OTHER; note = 2'-O-methyl modified nucleotide
  modified_base 31: mod_base = OTHER; note = 2'-O-methyl modified nucleotide
  modified_base 32: mod_base = OTHER; note = 2'-O-methyl modified nucleotide
  modified_base 33: mod_base = OTHER; note = 2'-O-methyl modified nucleotide
  modified_base 34: mod_base = OTHER; note = 2'-O-methyl modified nucleotide
  modified_base 35: mod_base = OTHER; note = 2'-O-methyl modified nucleotide
  modified_base 36: mod_base = OTHER; note = 2'-O-methyl modified nucleotide
  modified_base 37: mod_base = OTHER; note = 2'-O-methyl modified nucleotide
  modified_base 38: mod_base = OTHER; note = 2'-O-methyl modified nucleotide
  modified_base 39: mod_base = OTHER; note = 2'-O-methyl modified nucleotide
  modified_base 40: mod_base = OTHER; note = 2'-O-methyl modified nucleotide
  modified_base 69: mod_base = OTHER; note = 2'-O-methyl modified nucleotide
  modified_base 70: mod_base = OTHER; note = 2'-O-methyl modified nucleotide
  modified_base 71: mod_base = OTHER; note = 2'-O-methyl modified nucleotide
  modified_base 72: mod_base = OTHER; note = 2'-O-methyl modified nucleotide
  modified_base 73: mod_base = OTHER; note = 2'-O-methyl modified nucleotide
  modified_base 74: mod_base = OTHER; note = 2'-O-methyl modified nucleotide
  modified_base 75: mod_base = OTHER; note = 2'-O-methyl modified nucleotide
  modified_base 76: mod_base = OTHER; note = 2'-O-methyl modified nucleotide
  modified_base 77: mod_base = OTHER; note = 2'-O-methyl modified nucleotide
  modified_base 78: mod_base = OTHER; note = 2'-O-methyl modified nucleotide
  modified_base 79: mod_base = OTHER; note = 2'-O-methyl modified nucleotide
  modified_base 80: mod_base = OTHER; note = 2'-O-methyl modified nucleotide
  modified_base 81: mod_base = OTHER; note = 2'-O-methyl modified nucleotide
  modified_base 82: mod_base = OTHER; note = 2'-O-methyl modified nucleotide
  modified_base 83: mod_base = OTHER; note = 2'-O-methyl modified nucleotide
  modified_base 84: mod_base = OTHER; note = 2'-O-methyl modified nucleotide
  modified_base 85: mod_base = OTHER; note = 2'-O-methyl modified nucleotide
  modified_base 86: mod_base = OTHER; note = 2'-O-methyl modified nucleotide
  modified_base 87: mod_base = OTHER; note = 2'-O-methyl modified nucleotide
  modified_base 88: mod_base = OTHER; note = 2'-O-methyl modified nucleotide
  modified_base 89: mod_base = OTHER; note = 2'-O-methyl modified nucleotide
  modified_base 90: mod_base = OTHER; note = 2'-O-methyl modified nucleotide
  modified_base 91: mod_base = OTHER; note = 2'-O-methyl modified nucleotide
  modified_base 92: mod_base = OTHER; note = 2'-O-methyl modified nucleotide
  modified_base 93: mod_base = OTHER; note = 2'-O-methyl modified nucleotide
  modified_base 94: mod_base = OTHER; note = 2'-O-methyl modified nucleotide
  modified_base 95: mod_base = OTHER; note = 2'-O-methyl modified nucleotide
  modified_base 96: mod_base = OTHER; note = 2'-O-methyl modified nucleotide
  modified_base 122: mod_base = OTHER; note = Nucleotide with phosphorothioate linkage
  modified_base 123: mod_base = OTHER; note = 2'-O-methyl modified nucleotide with phosphorothioate linkage
  modified_base 124: mod_base = OTHER; note = 2'-O-methyl modified nucleotide with phosphorothioate linkage
  modified_base 125: mod_base = OTHER; note = 2'-O-methyl modified nucleotide
gagtagcgcgagcacagctagttttagagctagaaatagcaagttaaaataaggctagtccgttatcaacttgaaaaagtggcaccgagtcggtgcgctccgtggccttagtaaccctgtgctcg

SEQ ID NO: 17846 - RNA, 124 nt, synthetic construct
  source 1..124: mol_type = other RNA
  modified_base 1: mod_base = OTHER; note = 2'-O-methyl modified nucleotide with phosphorothioate linkage
  modified_base 2: mod_base = OTHER; note = 2'-O-methyl modified nucleotide with phosphorothioate linkage
  modified_base 3: mod_base = OTHER; note = 2'-O-methyl modified nucleotide with phosphorothioate linkage
  modified_base 29: mod_base = OTHER; note = 2'-O-methyl modified nucleotide
  modified_base 30: mod_base = OTHER; note = 2'-O-methyl modified nucleotide
  modified_base 31: mod_base = OTHER; note = 2'-O-methyl modified nucleotide
  modified_base 32: mod_base = OTHER; note = 2'-O-methyl modified nucleotide
  modified_base 33: mod_base = OTHER; note = 2'-O-methyl modified nucleotide
  modified_base 34: mod_base = OTHER; note = 2'-O-methyl modified nucleotide
  modified_base 35: mod_base = OTHER; note = 2'-O-methyl modified nucleotide
  modified_base 36: mod_base = OTHER; note = 2'-O-methyl modified nucleotide
  modified_base 37: mod_base = OTHER; note = 2'-O-methyl modified nucleotide
  modified_base 38: mod_base = OTHER; note = 2'-O-methyl modified nucleotide
  modified_base 39: mod_base = OTHER; note = 2'-O-methyl modified nucleotide
  modified_base 40: mod_base = OTHER; note = 2'-O-methyl modified nucleotide
  modified_base 69: mod_base = OTHER; note = 2'-O-methyl modified nucleotide
  modified_base 70: mod_base = OTHER; note = 2'-O-methyl modified nucleotide
  modified_base 71: mod_base = OTHER; note = 2'-O-methyl modified nucleotide
  modified_base 72: mod_base = OTHER; note = 2'-O-methyl modified nucleotide
  modified_base 73: mod_base = OTHER; note = 2'-O-methyl modified nucleotide
  modified_base 74: mod_base = OTHER; note = 2'-O-methyl modified nucleotide
  modified_base 75: mod_base = OTHER; note = 2'-O-methyl modified nucleotide
  modified_base 76: mod_base = OTHER; note = 2'-O-methyl modified nucleotide
  modified_base 77: mod_base = OTHER; note = 2'-O-methyl modified nucleotide
  modified_base 78: mod_base = OTHER; note = 2'-O-methyl modified nucleotide
  modified_base 79: mod_base = OTHER; note = 2'-O-methyl modified nucleotide
  modified_base 80: mod_base = OTHER; note = 2'-O-methyl modified nucleotide
  modified_base 81: mod_base = OTHER; note = 2'-O-methyl modified nucleotide
  modified_base 82: mod_base = OTHER; note = 2'-O-methyl modified nucleotide
  modified_base 83: mod_base = OTHER; note = 2'-O-methyl modified nucleotide
  modified_base 84: mod_base = OTHER; note = 2'-O-methyl modified nucleotide
  modified_base 85: mod_base = OTHER; note = 2'-O-methyl modified nucleotide
  modified_base 86: mod_base = OTHER; note = 2'-O-methyl modified nucleotide
  modified_base 87: mod_base = OTHER; note = 2'-O-methyl modified nucleotide
  modified_base 88: mod_base = OTHER; note = 2'-O-methyl modified nucleotide
  modified_base 89: mod_base = OTHER; note = 2'-O-methyl modified nucleotide
  modified_base 90: mod_base = OTHER; note = 2'-O-methyl modified nucleotide
  modified_base 91: mod_base = OTHER; note = 2'-O-methyl modified nucleotide
  modified_base 92: mod_base = OTHER; note = 2'-O-methyl modified nucleotide
  modified_base 93: mod_base = OTHER; note = 2'-O-methyl modified nucleotide
  modified_base 94: mod_base = OTHER; note = 2'-O-methyl modified nucleotide
  modified_base 95: mod_base = OTHER; note = 2'-O-methyl modified nucleotide
  modified_base 96: mod_base = OTHER; note = 2'-O-methyl modified nucleotide
  modified_base 121: mod_base = OTHER; note = Nucleotide with phosphorothioate linkage
  modified_base 122: mod_base = OTHER; note = 2'-O-methyl modified nucleotide with phosphorothioate linkage
  modified_base 123: mod_base = OTHER; note = 2'-O-methyl modified nucleotide with phosphorothioate linkage
  modified_base 124: mod_base = OTHER; note = 2'-O-methyl modified nucleotide
gagtagcgcgagcacagctagttttagagctagaaatagcaagttaaaataaggctagtccgttatcaacttgaaaaagtggcaccgagtcggtgcgctccgtggccttagtaaccctgtgctc

SEQ ID NO: 17847 - RNA, 131 nt, synthetic construct
  source 1..131: mol_type = other RNA
  modified_base 1: mod_base = OTHER; note = 2'-O-methyl modified nucleotide with phosphorothioate linkage
  modified_base 2: mod_base = OTHER; note = 2'-O-methyl modified nucleotide with phosphorothioate linkage
  modified_base 3: mod_base = OTHER; note = 2'-O-methyl modified nucleotide with phosphorothioate linkage
  modified_base 29: mod_base = OTHER; note = 2'-O-methyl modified nucleotide
  modified_base 30: mod_base = OTHER; note = 2'-O-methyl modified nucleotide
  modified_base 31: mod_base = OTHER; note = 2'-O-methyl modified nucleotide
  modified_base 32: mod_base = OTHER; note = 2'-O-methyl modified nucleotide
  modified_base 33: mod_base = OTHER; note = 2'-O-methyl modified nucleotide
  modified_base 34: mod_base = OTHER; note = 2'-O-methyl modified nucleotide
  modified_base 35: mod_base = OTHER; note = 2'-O-methyl modified nucleotide
  modified_base 36: mod_base = OTHER; note = 2'-O-methyl modified nucleotide
  modified_base 37: mod_base = OTHER; note = 2'-O-methyl modified nucleotide
  modified_base 38: mod_base = OTHER; note = 2'-O-methyl modified nucleotide
  modified_base 39: mod_base = OTHER; note = 2'-O-methyl modified nucleotide
  modified_base 40: mod_base = OTHER; note = 2'-O-methyl modified nucleotide
  modified_base 69: mod_base = OTHER; note = 2'-O-methyl modified nucleotide
  modified_base 70: mod_base = OTHER; note = 2'-O-methyl modified nucleotide
  modified_base 71: mod_base = OTHER; note = 2'-O-methyl modified nucleotide
  modified_base 72: mod_base = OTHER; note = 2'-O-methyl modified nucleotide
  modified_base 73: mod_base = OTHER; note = 2'-O-methyl modified nucleotide
  modified_base 74: mod_base = OTHER; note = 2'-O-methyl modified nucleotide
  modified_base 75: mod_base = OTHER; note = 2'-O-methyl modified nucleotide
  modified_base 76: mod_base = OTHER; note = 2'-O-methyl modified nucleotide
  modified_base 77: mod_base = OTHER; note = 2'-O-methyl modified nucleotide
  modified_base 78: mod_base = OTHER; note = 2'-O-methyl modified nucleotide
  modified_base 79: mod_base = OTHER; note = 2'-O-methyl modified nucleotide
  modified_base 80: mod_base = OTHER; note = 2'-O-methyl modified nucleotide
  modified_base 81: mod_base = OTHER; note = 2'-O-methyl modified nucleotide
  modified_base 82: mod_base = OTHER; note = 2'-O-methyl modified nucleotide
  modified_base 83: mod_base = OTHER; note = 2'-O-methyl modified nucleotide
  modified_base 84: mod_base = OTHER; note = 2'-O-methyl modified nucleotide
  modified_base 85: mod_base = OTHER; note = 2'-O-methyl modified nucleotide
  modified_base 86: mod_base = OTHER; note = 2'-O-methyl modified nucleotide
  modified_base 87: mod_base = OTHER; note = 2'-O-methyl modified nucleotide
  modified_base 88: mod_base = OTHER; note = 2'-O-methyl modified nucleotide
  modified_base 89: mod_base = OTHER; note = 2'-O-methyl modified nucleotide
  modified_base 90: mod_base = OTHER; note = 2'-O-methyl modified nucleotide
  modified_base 91: mod_base = OTHER; note = 2'-O-methyl modified nucleotide
  modified_base 92: mod_base = OTHER; note = 2'-O-methyl modified nucleotide
  modified_base 93: mod_base = OTHER; note = 2'-O-methyl modified nucleotide
  modified_base 94: mod_base = OTHER; note = 2'-O-methyl modified nucleotide
  modified_base 95: mod_base = OTHER; note = 2'-O-methyl modified nucleotide
  modified_base 96: mod_base = OTHER; note = 2'-O-methyl modified nucleotide
  modified_base 128: mod_base = OTHER; note = Nucleotide with phosphorothioate linkage
  modified_base 129: mod_base = OTHER; note = 2'-O-methyl modified nucleotide with phosphorothioate linkage
  modified_base 130: mod_base = OTHER; note = 2'-O-methyl modified nucleotide with phosphorothioate linkage
  modified_base 131: mod_base = OTHER; note = 2'-O-methyl modified nucleotide
gagtagcgcgagcacagctagttttagagctagaaatagcaagttaaaataaggctagtccgttatcaacttgaaaaagtggcaccgagtcggtgctcgctccgtggccttagtaaccctgtgctcgcgct

SEQ ID NO: 17848 - RNA, 130 nt, synthetic construct
  source 1..130: mol_type = other RNA
  modified_base 1: mod_base = OTHER; note = 2'-O-methyl modified nucleotide with phosphorothioate linkage
  modified_base 2: mod_base = OTHER; note = 2'-O-methyl modified nucleotide with phosphorothioate linkage
  modified_base 3: mod_base = OTHER; note = 2'-O-methyl modified nucleotide with phosphorothioate linkage
  modified_base 29: mod_base = OTHER; note = 2'-O-methyl modified nucleotide
  modified_base 30: mod_base = OTHER; note = 2'-O-methyl modified nucleotide
  modified_base 31: mod_base = OTHER; note = 2'-O-methyl modified nucleotide
  modified_base 32: mod_base = OTHER; note = 2'-O-methyl modified nucleotide
  modified_base 33: mod_base = OTHER; note = 2'-O-methyl modified nucleotide
  modified_base 34: mod_base = OTHER; note = 2'-O-methyl modified nucleotide
  modified_base 35: mod_base = OTHER; note = 2'-O-methyl modified nucleotide
  modified_base 36: mod_base = OTHER; note = 2'-O-methyl modified nucleotide
  modified_base 37: mod_base = OTHER; note = 2'-O-methyl modified nucleotide
  modified_base 38: mod_base = OTHER; note = 2'-O-methyl modified nucleotide
  modified_base 39: mod_base = OTHER; note = 2'-O-methyl modified nucleotide
  modified_base 40: mod_base = OTHER; note = 2'-O-methyl modified nucleotide
  modified_base 69: mod_base = OTHER; note = 2'-O-methyl modified nucleotide
  modified_base 70: mod_base = OTHER; note = 2'-O-methyl modified nucleotide
  modified_base 71: mod_base = OTHER; note = 2'-O-methyl modified nucleotide
  modified_base 72: mod_base = OTHER; note = 2'-O-methyl modified nucleotide
  modified_base 73: mod_base = OTHER; note = 2'-O-methyl modified nucleotide
  modified_base 74: mod_base = OTHER; note = 2'-O-methyl modified nucleotide
  modified_base 75: mod_base = OTHER; note = 2'-O-methyl modified nucleotide
  modified_base 76: mod_base = OTHER; note = 2'-O-methyl modified nucleotide
  modified_base 77: mod_base = OTHER; note = 2'-O-methyl modified nucleotide
  modified_base 78: mod_base = OTHER; note = 2'-O-methyl modified nucleotide
  modified_base 79: mod_base = OTHER; note = 2'-O-methyl modified nucleotide
  modified_base 80: mod_base = OTHER; note = 2'-O-methyl modified nucleotide
  modified_base 81: mod_base = OTHER; note = 2'-O-methyl modified nucleotide
  modified_base 82: mod_base = OTHER; note = 2'-O-methyl modified nucleotide
  modified_base 83: mod_base = OTHER; note = 2'-O-methyl modified nucleotide
  modified_base 84: mod_base = OTHER; note = 2'-O-methyl modified nucleotide
  modified_base 85: mod_base = OTHER; note = 2'-O-methyl modified nucleotide
  modified_base 86: mod_base = OTHER; note = 2'-O-methyl modified nucleotide
  modified_base 87: mod_base = OTHER; note = 2'-O-methyl modified nucleotide
  modified_base 88: mod_base = OTHER; note = 2'-O-methyl modified nucleotide
  modified_base 89: mod_base = OTHER; note = 2'-O-methyl modified nucleotide
  modified_base 90: mod_base = OTHER; note = 2'-O-methyl modified nucleotide
  modified_base 91: mod_base = OTHER; note = 2'-O-methyl modified nucleotide
  modified_base 92: mod_base = OTHER; note = 2'-O-methyl modified nucleotide
  modified_base 93: mod_base = OTHER; note = 2'-O-methyl modified nucleotide
  modified_base 94: mod_base = OTHER; note = 2'-O-methyl modified nucleotide
  modified_base 95: mod_base = OTHER; note = 2'-O-methyl modified nucleotide
  modified_base 96: mod_base = OTHER; note = 2'-O-methyl modified nucleotide
  modified_base 127: mod_base = OTHER; note = Nucleotide with phosphorothioate linkage
  modified_base 128: mod_base = OTHER; note = 2'-O-methyl modified nucleotide with phosphorothioate linkage
  modified_base 129: mod_base = OTHER; note = 2'-O-methyl modified nucleotide with phosphorothioate linkage
  modified_base 130: mod_base = OTHER; note = 2'-O-methyl modified nucleotide
gagtagcgcgagcacagctagttttagagctagaaatagcaagttaaaataaggctagtccgttatcaacttgaaaaagtggcaccgagtcggtgctcgctccgtggccttagtaaccctgtgctcgcgc

SEQ ID NO: 17849 - RNA, 129 nt, synthetic construct
  source 1..129: mol_type = other RNA
  modified_base 1: mod_base = OTHER; note = 2'-O-methyl modified nucleotide with phosphorothioate linkage
  modified_base 2: mod_base = OTHER; note = 2'-O-methyl modified nucleotide with phosphorothioate linkage
  modified_base 3: mod_base = OTHER; note = 2'-O-methyl modified nucleotide with phosphorothioate linkage
  modified_base 29: mod_base = OTHER; note = 2'-O-methyl modified nucleotide
  modified_base 30: mod_base = OTHER; note = 2'-O-methyl modified nucleotide
  modified_base 31: mod_base = OTHER; note = 2'-O-methyl modified nucleotide
  modified_base 32: mod_base = OTHER; note = 2'-O-methyl modified nucleotide
  modified_base 33: mod_base = OTHER; note = 2'-O-methyl modified nucleotide
  modified_base 34: mod_base = OTHER; note = 2'-O-methyl modified nucleotide
  modified_base 35: mod_base = OTHER; note = 2'-O-methyl modified nucleotide
  modified_base 36: mod_base = OTHER; note = 2'-O-methyl modified nucleotide
  modified_base 37: mod_base = OTHER; note = 2'-O-methyl modified nucleotide
  modified_base 38: mod_base = OTHER; note = 2'-O-methyl modified nucleotide
  modified_base 39: mod_base = OTHER; note = 2'-O-methyl modified nucleotide
  modified_base 40: mod_base = OTHER; note = 2'-O-methyl modified nucleotide
  modified_base 69: mod_base = OTHER; note = 2'-O-methyl modified nucleotide
  modified_base 70: mod_base = OTHER; note = 2'-O-methyl modified nucleotide
  modified_base 71: mod_base = OTHER; note = 2'-O-methyl modified nucleotide
  modified_base 72: mod_base = OTHER; note = 2'-O-methyl modified nucleotide
  modified_base 73: mod_base = OTHER; note = 2'-O-methyl modified nucleotide
  modified_base 74: mod_base = OTHER; note = 2'-O-methyl modified nucleotide
  modified_base 75: mod_base = OTHER; note = 2'-O-methyl modified nucleotide
  modified_base 76: mod_base = OTHER; note = 2'-O-methyl modified nucleotide
  modified_base 77: mod_base = OTHER; note = 2'-O-methyl modified nucleotide
  modified_base 78: mod_base = OTHER; note = 2'-O-methyl modified nucleotide
  modified_base 79: mod_base = OTHER; note = 2'-O-methyl modified nucleotide
  modified_base 80: mod_base = OTHER; note = 2'-O-methyl modified nucleotide
  modified_base 81: mod_base = OTHER; note = 2'-O-methyl modified nucleotide
  modified_base 82: mod_base = OTHER; note = 2'-O-methyl modified nucleotide
  modified_base 83: mod_base = OTHER; note = 2'-O-methyl modified nucleotide
  modified_base 84: mod_base = OTHER; note = 2'-O-methyl modified nucleotide
  modified_base 85: mod_base = OTHER; note = 2'-O-methyl modified nucleotide
  modified_base 86: mod_base = OTHER; note = 2'-O-methyl modified nucleotide
  modified_base 87: mod_base = OTHER; note = 2'-O-methyl modified nucleotide
  modified_base 88: mod_base = OTHER; note = 2'-O-methyl modified nucleotide
  modified_base 89: mod_base = OTHER; note = 2'-O-methyl modified nucleotide
  modified_base 90: mod_base = OTHER; note = 2'-O-methyl modified nucleotide
  modified_base 91: mod_base = OTHER; note = 2'-O-methyl modified nucleotide
  modified_base 92: mod_base = OTHER; note = 2'-O-methyl modified nucleotide
  modified_base 93: mod_base = OTHER; note = 2'-O-methyl modified nucleotide
  modified_base 94: mod_base = OTHER; note = 2'-O-methyl modified nucleotide
  modified_base 95: mod_base = OTHER; note = 2'-O-methyl modified nucleotide
  modified_base 96: mod_base = OTHER; note = 2'-O-methyl modified nucleotide
  modified_base 126: mod_base = OTHER; note = Nucleotide with phosphorothioate linkage
  modified_base 127: mod_base = OTHER; note = 2'-O-methyl modified nucleotide with phosphorothioate linkage
  modified_base 128: mod_base = OTHER; note = 2'-O-methyl modified nucleotide with phosphorothioate linkage
  modified_base 129: mod_base = OTHER; note = 2'-O-methyl modified nucleotide
gagtagcgcgagcacagctagttttagagctagaaatagcaagttaaaataaggctagtccgttatcaacttgaaaaagtggcaccgagtcggtgctcgctccgtggccttagtaaccctgtgctcgcg

SEQ ID NO: 17850 - RNA, 128 nt, synthetic construct
  source 1..128: mol_type = other RNA
  modified_base 1: mod_base = OTHER; note = 2'-O-methyl modified nucleotide with phosphorothioate linkage
  modified_base 2: mod_base = OTHER; note = 2'-O-methyl modified nucleotide with phosphorothioate linkage
  modified_base 3: mod_base = OTHER; note = 2'-O-methyl modified nucleotide with phosphorothioate linkage
  modified_base 29: mod_base = OTHER; note = 2'-O-methyl modified nucleotide
  modified_base 30: mod_base = OTHER; note = 2'-O-methyl modified nucleotide
  modified_base 31: mod_base = OTHER; note = 2'-O-methyl modified nucleotide
  modified_base 32: mod_base = OTHER; note = 2'-O-methyl modified nucleotide
  modified_base 33: mod_base = OTHER; note = 2'-O-methyl modified nucleotide
  modified_base 34: mod_base = OTHER; note = 2'-O-methyl modified nucleotide
  modified_base 35: mod_base = OTHER; note = 2'-O-methyl modified nucleotide
  modified_base 36: mod_base = OTHER; note = 2'-O-methyl modified nucleotide
  modified_base 37: mod_base = OTHER; note = 2'-O-methyl modified nucleotide
  modified_base 38: mod_base = OTHER; note = 2'-O-methyl modified nucleotide
  modified_base 39: mod_base = OTHER; note = 2'-O-methyl modified nucleotide
  modified_base 40: mod_base = OTHER; note = 2'-O-methyl modified nucleotide
  modified_base 69: mod_base = OTHER; note = 2'-O-methyl modified nucleotide
  modified_base 70: mod_base = OTHER; note = 2'-O-methyl modified nucleotide
  modified_base 71: mod_base = OTHER; note = 2'-O-methyl modified nucleotide
  modified_base 72: mod_base = OTHER; note = 2'-O-methyl modified nucleotide
  modified_base 73: mod_base = OTHER; note = 2'-O-methyl modified nucleotide
  modified_base 74: mod_base = OTHER; note = 2'-O-methyl modified nucleotide
  modified_base 75: mod_base = OTHER; note = 2'-O-methyl modified nucleotide
  modified_base 76: mod_base = OTHER; note = 2'-O-methyl modified nucleotide
  modified_base 77: mod_base = OTHER; note = 2'-O-methyl modified nucleotide
  modified_base 78: mod_base = OTHER; note = 2'-O-methyl modified nucleotide
  modified_base 79: mod_base = OTHER; note = 2'-O-methyl modified nucleotide
  modified_base 80: mod_base = OTHER; note = 2'-O-methyl modified nucleotide
  modified_base 81: mod_base = OTHER; note = 2'-O-methyl modified nucleotide
  modified_base 82: mod_base = OTHER; note = 2'-O-methyl modified nucleotide
  modified_base 83: mod_base = OTHER; note = 2'-O-methyl modified nucleotide
  modified_base 84: mod_base = OTHER; note = 2'-O-methyl modified nucleotide
  modified_base 85: mod_base = OTHER; note = 2'-O-methyl modified nucleotide
  modified_base 86: mod_base = OTHER; note = 2'-O-methyl modified nucleotide
  modified_base 87: mod_base = OTHER; note = 2'-O-methyl modified nucleotide
  modified_base 88: mod_base = OTHER; note = 2'-O-methyl modified nucleotide
  modified_base 89: mod_base = OTHER; note = 2'-O-methyl modified nucleotide
  modified_base 90: mod_base = OTHER; note = 2'-O-methyl modified nucleotide
  modified_base 91: mod_base = OTHER; note = 2'-O-methyl modified nucleotide
  modified_base 92: mod_base = OTHER; note = 2'-O-methyl modified nucleotide
  modified_base 93: mod_base = OTHER; note = 2'-O-methyl modified nucleotide
  modified_base 94: mod_base = OTHER; note = 2'-O-methyl modified nucleotide
  modified_base 95: mod_base = OTHER; note = 2'-O-methyl modified nucleotide
  modified_base 96: mod_base = OTHER; note = 2'-O-methyl modified nucleotide
  modified_base 125: mod_base = OTHER; note = Nucleotide with phosphorothioate linkage
  modified_base 126: mod_base = OTHER; note = 2'-O-methyl modified nucleotide with phosphorothioate linkage
  modified_base 127: mod_base = OTHER; note = 2'-O-methyl modified nucleotide with phosphorothioate linkage
  modified_base 128: mod_base = OTHER; note = 2'-O-methyl modified nucleotide
gagtagcgcgagcacagctagttttagagctagaaatagcaagttaaaataaggctagtccgttatcaacttgaaaaagtggcaccgagtcggtgctcgctccgtggccttagtaaccctgtgctcgc

SEQ ID NO: 17851 - RNA, 127 nt, synthetic construct
  source 1..127: mol_type = other RNA
  modified_base 1: mod_base = OTHER; note = 2'-O-methyl modified nucleotide with phosphorothioate linkage
  modified_base 2: mod_base = OTHER; note = 2'-O-methyl modified nucleotide with phosphorothioate linkage
  modified_base 3: mod_base = OTHER; note = 2'-O-methyl modified nucleotide with phosphorothioate linkage
  modified_base 29: mod_base = OTHER; note = 2'-O-methyl modified nucleotide
  modified_base 30: mod_base = OTHER; note = 2'-O-methyl modified nucleotide
  modified_base 31: mod_base = OTHER; note = 2'-O-methyl modified nucleotide
  modified_base 32: mod_base = OTHER; note = 2'-O-methyl modified nucleotide
  modified_base 33: mod_base = OTHER; note = 2'-O-methyl modified nucleotide
  modified_base 34: mod_base = OTHER; note = 2'-O-methyl modified nucleotide
  modified_base 35: mod_base = OTHER; note = 2'-O-methyl modified nucleotide
  modified_base 36: mod_base = OTHER; note = 2'-O-methyl modified nucleotide
  modified_base 37: mod_base = OTHER; note = 2'-O-methyl modified nucleotide
  modified_base 38: mod_base = OTHER; note = 2'-O-methyl modified nucleotide
  modified_base 39: mod_base = OTHER; note = 2'-O-methyl modified nucleotide
  modified_base 40: mod_base = OTHER; note = 2'-O-methyl modified nucleotide
  modified_base 69: mod_base = OTHER; note = 2'-O-methyl modified nucleotide
  modified_base 70: mod_base = OTHER; note = 2'-O-methyl modified nucleotide
  modified_base 71: mod_base = OTHER; note = 2'-O-methyl modified nucleotide
  modified_base 72: mod_base = OTHER; note = 2'-O-methyl modified nucleotide
  modified_base 73: mod_base = OTHER; note = 2'-O-methyl modified nucleotide
  modified_base 74: mod_base = OTHER; note = 2'-O-methyl modified nucleotide
  modified_base 75: mod_base = OTHER; note = 2'-O-methyl modified nucleotide
  modified_base 76: mod_base = OTHER; note = 2'-O-methyl modified nucleotide
  modified_base 77: mod_base = OTHER; note = 2'-O-methyl modified nucleotide
  modified_base 78: mod_base = OTHER; note = 2'-O-methyl modified nucleotide
  modified_base 79: mod_base = OTHER; note = 2'-O-methyl modified nucleotide
  modified_base 80: mod_base = OTHER; note = 2'-O-methyl modified nucleotide
  modified_base 81: mod_base = OTHER; note = 2'-O-methyl modified nucleotide
  modified_base 82: mod_base = OTHER; note = 2'-O-methyl modified nucleotide
  modified_base 83: mod_base = OTHER; note = 2'-O-methyl modified nucleotide
  modified_base 84: mod_base = OTHER; note = 2'-O-methyl modified nucleotide
  modified_base 85: mod_base = OTHER; note = 2'-O-methyl modified nucleotide
  modified_base 86: mod_base = OTHER; note = 2'-O-methyl modified nucleotide
  modified_base 87: mod_base = OTHER; note = 2'-O-methyl modified nucleotide
  modified_base 88: mod_base = OTHER; note = 2'-O-methyl modified nucleotide
  modified_base 89: mod_base = OTHER; note = 2'-O-methyl modified nucleotide
  modified_base 90: mod_base = OTHER; note = 2'-O-methyl modified nucleotide
  modified_base 91: mod_base = OTHER; note = 2'-O-methyl modified nucleotide
  modified_base 92: mod_base = OTHER; note = 2'-O-methyl modified nucleotide
  modified_base 93: mod_base = OTHER; note = 2'-O-methyl modified nucleotide
  modified_base 94: mod_base = OTHER; note = 2'-O-methyl modified nucleotide
  modified_base 95: mod_base = OTHER; note = 2'-O-methyl modified nucleotide
  modified_base 96: mod_base = OTHER; note = 2'-O-methyl modified nucleotide
  modified_base 124: mod_base = OTHER; note = Nucleotide with phosphorothioate linkage
  modified_base 125: mod_base = OTHER; note = 2'-O-methyl modified nucleotide with phosphorothioate linkage
  modified_base 126: mod_base = OTHER; note = 2'-O-methyl modified nucleotide with phosphorothioate linkage
  modified_base 127: mod_base = OTHER; note = 2'-O-methyl modified nucleotide
gagtagcgcgagcacagctagttttagagctagaaatagcaagttaaaataaggctagtccgttatcaacttgaaaaagtggcaccgagtcggtgctcgctccgtggccttagtaaccctgtgctcg

SEQ ID NO: 17852 - RNA, 126 nt, synthetic construct
  source 1..126: mol_type = other RNA
  modified_base 1: mod_base = OTHER; note = 2'-O-methyl modified nucleotide with phosphorothioate linkage
  modified_base 2: mod_base = OTHER; note = 2'-O-methyl modified nucleotide with phosphorothioate linkage
  modified_base 3: mod_base = OTHER; note = 2'-O-methyl modified nucleotide with phosphorothioate linkage
  modified_base 29: mod_base = OTHER; note = 2'-O-methyl modified nucleotide
  modified_base 30: mod_base = OTHER; note = 2'-O-methyl modified nucleotide
  modified_base 31: mod_base = OTHER; note = 2'-O-methyl modified nucleotide
  modified_base 32: mod_base = OTHER; note = 2'-O-methyl modified nucleotide
  modified_base 33: mod_base = OTHER; note = 2'-O-methyl modified nucleotide
  modified_base 34: mod_base = OTHER; note = 2'-O-methyl modified nucleotide
  modified_base 35: mod_base = OTHER; note = 2'-O-methyl modified nucleotide
  modified_base 36: mod_base = OTHER; note = 2'-O-methyl modified nucleotide
  modified_base 37: mod_base = OTHER; note = 2'-O-methyl modified nucleotide
  modified_base 38: mod_base = OTHER; note = 2'-O-methyl modified nucleotide
  modified_base 39: mod_base = OTHER; note = 2'-O-methyl modified nucleotide
  modified_base 40: mod_base = OTHER; note = 2'-O-methyl modified nucleotide
  modified_base 69: mod_base = OTHER; note = 2'-O-methyl modified nucleotide
  modified_base 70: mod_base = OTHER; note = 2'-O-methyl modified nucleotide
  modified_base 71: mod_base = OTHER; note = 2'-O-methyl modified nucleotide
  modified_base 72: mod_base = OTHER; note = 2'-O-methyl modified nucleotide
  modified_base 73: mod_base = OTHER; note = 2'-O-methyl modified nucleotide
  modified_base 74: mod_base = OTHER; note = 2'-O-methyl modified nucleotide
  modified_base 75: mod_base = OTHER; note = 2'-O-methyl modified nucleotide
  modified_base 76: mod_base = OTHER; note = 2'-O-methyl modified nucleotide
  modified_base 77: mod_base = OTHER; note = 2'-O-methyl modified nucleotide
  modified_base 78: mod_base = OTHER; note = 2'-O-methyl modified nucleotide
  modified_base 79: mod_base = OTHER; note = 2'-O-methyl modified nucleotide
  modified_base 80: mod_base = OTHER; note = 2'-O-methyl modified nucleotide
  modified_base 81: mod_base = OTHER; note = 2'-O-methyl modified nucleotide
  modified_base 82: mod_base = OTHER; note = 2'-O-methyl modified nucleotide
  modified_base 83: mod_base = OTHER; note = 2'-O-methyl modified nucleotide
  modified_base 84: mod_base = OTHER; note = 2'-O-methyl modified nucleotide
  modified_base 85: mod_base = OTHER; note = 2'-O-methyl modified nucleotide
  modified_base 86: mod_base = OTHER; note = 2'-O-methyl modified nucleotide
  modified_base 87: mod_base = OTHER; note = 2'-O-methyl modified nucleotide
  modified_base 88: mod_base = OTHER; note = 2'-O-methyl modified nucleotide
  modified_base 89: mod_base = OTHER; note = 2'-O-methyl modified nucleotide
  modified_base 90: mod_base = OTHER; note = 2'-O-methyl modified nucleotide
  modified_base 91: mod_base = OTHER; note = 2'-O-methyl modified nucleotide
  modified_base 92: mod_base = OTHER; note = 2'-O-methyl modified nucleotide
  modified_base 93: mod_base = OTHER; note = 2'-O-methyl modified nucleotide
  modified_base 94: mod_base = OTHER; note = 2'-O-methyl modified nucleotide
  modified_base 95: mod_base = OTHER; note = 2'-O-methyl modified nucleotide
  modified_base 96: mod_base = OTHER; note = 2'-O-methyl modified nucleotide
  modified_base 123: mod_base = OTHER; note = Nucleotide with phosphorothioate linkage
  modified_base 124: mod_base = OTHER; note = 2'-O-methyl modified nucleotide with phosphorothioate linkage
  modified_base 125: mod_base = OTHER; note = 2'-O-methyl modified nucleotide with phosphorothioate linkage
  modified_base 126: mod_base = OTHER; note = 2'-O-methyl modified nucleotide
gagtagcgcgagcacagctagttttagagctagaaatagcaagttaaaataaggctagtccgttatcaacttgaaaaagtggcaccgagtcggtgctcgctccgtggccttagtaaccctgtgctc

SEQ ID NO: 17853 - RNA, 133 nt, synthetic construct
  source 1..133: mol_type = other RNA
  modified_base 1: mod_base = OTHER; note = 2'-O-methyl modified nucleotide with phosphorothioate linkage
  modified_base 2: mod_base = OTHER; note = 2'-O-methyl modified nucleotide with phosphorothioate linkage
  modified_base 3: mod_base = OTHER; note = 2'-O-methyl modified nucleotide with phosphorothioate linkage
  modified_base 29: mod_base = OTHER; note = 2'-O-methyl modified nucleotide
  modified_base 30: mod_base = OTHER; note = 2'-O-methyl modified nucleotide
  modified_base 31: mod_base = OTHER; note = 2'-O-methyl modified nucleotide
  modified_base 32: mod_base = OTHER; note = 2'-O-methyl modified nucleotide
  modified_base 33: mod_base = OTHER; note = 2'-O-methyl modified nucleotide
  modified_base 34: mod_base = OTHER; note = 2'-O-methyl modified nucleotide
  modified_base 35: mod_base = OTHER; note = 2'-O-methyl modified nucleotide
  modified_base 36: mod_base = OTHER; note = 2'-O-methyl modified nucleotide
  modified_base 37: mod_base = OTHER; note = 2'-O-methyl modified nucleotide
  modified_base 38: mod_base = OTHER; note = 2'-O-methyl modified nucleotide
  modified_base 39: mod_base = OTHER; note = 2'-O-methyl modified nucleotide
  modified_base 40: mod_base = OTHER; note = 2'-O-methyl modified nucleotide
  modified_base 69: mod_base = OTHER; note = 2'-O-methyl modified nucleotide
  modified_base 70: mod_base = OTHER; note = 2'-O-methyl modified nucleotide
  modified_base 71: mod_base = OTHER; note = 2'-O-methyl modified nucleotide
  modified_base 72: mod_base = OTHER; note = 2'-O-methyl modified nucleotide
  modified_base 73: mod_base = OTHER; note = 2'-O-methyl modified nucleotide
  modified_base 74: mod_base = OTHER; note = 2'-O-methyl modified nucleotide
  modified_base 75: mod_base = OTHER; note = 2'-O-methyl modified nucleotide
  modified_base 76: mod_base = OTHER; note = 2'-O-methyl modified nucleotide
  modified_base 77: mod_base = OTHER; note = 2'-O-methyl modified nucleotide
  modified_base 78: mod_base = OTHER; note = 2'-O-methyl modified nucleotide
  modified_base 79: mod_base = OTHER; note = 2'-O-methyl modified nucleotide
  modified_base 80: mod_base = OTHER; note = 2'-O-methyl modified nucleotide
  modified_base 81: mod_base = OTHER; note = 2'-O-methyl modified nucleotide
  modified_base 82: mod_base = OTHER; note = 2'-O-methyl modified nucleotide
  modified_base 83: mod_base = OTHER; note = 2'-O-methyl modified nucleotide
  modified_base 84: mod_base = OTHER; note = 2'-O-methyl modified nucleotide
  modified_base 85: mod_base = OTHER; note = 2'-O-methyl modified nucleotide
  modified_base 86: mod_base = OTHER; note = 2'-O-methyl modified nucleotide
  modified_base 87: mod_base = OTHER; note = 2'-O-methyl modified nucleotide
  modified_base 88: mod_base = OTHER; note = 2'-O-methyl modified nucleotide
  modified_base 89: mod_base = OTHER; note = 2'-O-methyl modified nucleotide
  modified_base 90: mod_base = OTHER; note = 2'-O-methyl modified nucleotide
  modified_base 91: mod_base = OTHER; note = 2'-O-methyl modified nucleotide
  modified_base 92: mod_base = OTHER; note = 2'-O-methyl modified nucleotide
  modified_base 93: mod_base = OTHER; note = 2'-O-methyl modified nucleotide
  modified_base 94: mod_base = OTHER; note = 2'-O-methyl modified nucleotide
  modified_base 95: mod_base = OTHER; note = 2'-O-methyl modified nucleotide
  modified_base 96: mod_base = OTHER; note = 2'-O-methyl modified nucleotide
  modified_base 130: mod_base = OTHER; note = Nucleotide with phosphorothioate linkage
  modified_base 131: mod_base = OTHER; note = 2'-O-methyl modified nucleotide with phosphorothioate linkage
  modified_base 132: mod_base = OTHER; note = 2'-O-methyl modified nucleotide with phosphorothioate linkage
  modified_base 133: mod_base = OTHER; note = 2'-O-methyl modified nucleotide
gagtagcgcgagcacagctagttttagagctagaaatagcaagttaaaataaggctagtccgttatcaacttgaaaaagtggcaccgagtcggtgctctcgctccgtggccttagtaaccctgtgctcgcgct

SEQ ID NO: 17854 - RNA, 132 nt, synthetic construct
  source 1..132: mol_type = other RNA
  modified_base 1: mod_base = OTHER; note = 2'-O-methyl modified nucleotide with phosphorothioate linkage
  modified_base 2: mod_base = OTHER; note = 2'-O-methyl modified nucleotide with phosphorothioate linkage
  modified_base 3: mod_base = OTHER; note = 2'-O-methyl modified nucleotide with phosphorothioate linkage
  modified_base 29: mod_base = OTHER; note = 2'-O-methyl modified nucleotide
  modified_base 30: mod_base = OTHER; note = 2'-O-methyl modified nucleotide
  modified_base 31: mod_base = OTHER; note = 2'-O-methyl modified nucleotide
  modified_base 32: mod_base = OTHER; note = 2'-O-methyl modified nucleotide
  modified_base 33: mod_base = OTHER; note = 2'-O-methyl modified nucleotide
  modified_base 34: mod_base = OTHER; note = 2'-O-methyl modified nucleotide
  modified_base 35: mod_base = OTHER; note = 2'-O-methyl modified nucleotide
  modified_base 36: mod_base = OTHER; note = 2'-O-methyl modified nucleotide
  modified_base 37: mod_base = OTHER; note = 2'-O-methyl modified nucleotide
  modified_base 38: mod_base = OTHER; note = 2'-O-methyl modified nucleotide
  modified_base 39: mod_base = OTHER; note = 2'-O-methyl modified nucleotide
  modified_base 40: mod_base = OTHER; note = 2'-O-methyl modified nucleotide
  modified_base 69: mod_base = OTHER; note = 2'-O-methyl modified nucleotide
  modified_base 70: mod_base = OTHER; note = 2'-O-methyl modified nucleotide
  modified_base 71: mod_base = OTHER; note = 2'-O-methyl modified nucleotide
  modified_base 72: mod_base = OTHER; note = 2'-O-methyl modified nucleotide
  modified_base 73: mod_base = OTHER; note = 2'-O-methyl modified nucleotide
  modified_base 74: mod_base = OTHER; note = 2'-O-methyl modified nucleotide
  modified_base 75: mod_base = OTHER; note = 2'-O-methyl modified nucleotide
  modified_base 76: mod_base = OTHER; note = 2'-O-methyl modified nucleotide
  modified_base 77: mod_base = OTHER; note = 2'-O-methyl modified nucleotide
  modified_base 78: mod_base = OTHER; note = 2'-O-methyl modified nucleotide
  modified_base 79: mod_base = OTHER; note = 2'-O-methyl modified nucleotide
  modified_base 80: mod_base = OTHER; note = 2'-O-methyl modified nucleotide
  modified_base 81: mod_base = OTHER; note = 2'-O-methyl modified nucleotide
  modified_base 82: mod_base = OTHER; note = 2'-O-methyl modified nucleotide
  modified_base 83: mod_base = OTHER; note = 2'-O-methyl modified nucleotide
  modified_base 84: mod_base = OTHER; note = 2'-O-methyl modified nucleotide
  modified_base 85: mod_base = OTHER; note = 2'-O-methyl modified nucleotide
  modified_base 86: mod_base = OTHER; note = 2'-O-methyl modified nucleotide
  modified_base 87: mod_base = OTHER; note = 2'-O-methyl modified nucleotide
  modified_base 88: mod_base = OTHER; note = 2'-O-methyl modified nucleotide
  modified_base 89: mod_base = OTHER; note = 2'-O-methyl modified nucleotide
  modified_base 90: mod_base = OTHER; note = 2'-O-methyl modified nucleotide
  modified_base 91: mod_base = OTHER; note = 2'-O-methyl modified nucleotide
  modified_base 92: mod_base = OTHER; note = 2'-O-methyl modified nucleotide
  modified_base 93: mod_base = OTHER; note = 2'-O-methyl modified nucleotide
  modified_base 94: mod_base = OTHER; note = 2'-O-methyl modified nucleotide
  modified_base 95: mod_base = OTHER; note = 2'-O-methyl modified nucleotide
  modified_base 96: mod_base = OTHER; note = 2'-O-methyl modified nucleotide
  modified_base 129: mod_base = OTHER; note = Nucleotide with phosphorothioate linkage
  modified_base 130: mod_base = OTHER; note = 2'-O-methyl modified nucleotide with phosphorothioate linkage
  modified_base 131: mod_base = OTHER; note = 2'-O-methyl modified nucleotide with phosphorothioate linkage
  modified_base 132: mod_base = OTHER; note = 2'-O-methyl modified nucleotide
gagtagcgcgagcacagctagttttagagctagaaatagcaagttaaaataaggctagtccgttatcaacttgaaaaagtggcaccgagtcggtgctctcgctccgtggccttagtaaccctgtgctcgcgc

SEQ ID NO: 17855 - RNA, 131 nt, synthetic construct
  source 1..131: mol_type = other RNA
  modified_base 1: mod_base = OTHER; note = 2'-O-methyl modified nucleotide with phosphorothioate linkage
  modified_base 2: mod_base = OTHER; note = 2'-O-methyl modified nucleotide with phosphorothioate linkage
  modified_base 3: mod_base = OTHER; note = 2'-O-methyl modified nucleotide with phosphorothioate linkage
  modified_base 29: mod_base = OTHER; note = 2'-O-methyl modified nucleotide
  modified_base 30: mod_base = OTHER; note = 2'-O-methyl modified nucleotide
  modified_base 31: mod_base = OTHER; note = 2'-O-methyl modified nucleotide
  modified_base 32: mod_base = OTHER; note = 2'-O-methyl modified nucleotide
  modified_base 33: mod_base = OTHER; note = 2'-O-methyl modified nucleotide
  modified_base 34: mod_base = OTHER; note = 2'-O-methyl modified nucleotide
  modified_base 35: mod_base = OTHER; note = 2'-O-methyl modified nucleotide
  modified_base 36: mod_base = OTHER; note = 2'-O-methyl modified nucleotide
  modified_base 37: mod_base = OTHER; note = 2'-O-methyl modified nucleotide
  modified_base 38: mod_base = OTHER; note = 2'-O-methyl modified nucleotide
  modified_base 39: mod_base = OTHER; note = 2'-O-methyl modified nucleotide
  modified_base 40: mod_base = OTHER; note = 2'-O-methyl modified nucleotide
  modified_base 69: mod_base = OTHER; note = 2'-O-methyl modified nucleotide
  modified_base 70: mod_base = OTHER; note = 2'-O-methyl modified nucleotide
  modified_base 71: mod_base = OTHER; note = 2'-O-methyl modified nucleotide
  modified_base 72: mod_base = OTHER; note = 2'-O-methyl modified nucleotide
  modified_base 73: mod_base = OTHER; note = 2'-O-methyl modified nucleotide
  modified_base 74: mod_base = OTHER; note = 2'-O-methyl modified nucleotide
  modified_base 75: mod_base = OTHER; note = 2'-O-methyl modified nucleotide
  modified_base 76: mod_base = OTHER; note = 2'-O-methyl modified nucleotide
  modified_base 77: mod_base = OTHER; note = 2'-O-methyl modified nucleotide
  modified_base 78: mod_base = OTHER; note = 2'-O-methyl modified nucleotide
  modified_base 79: mod_base = OTHER; note = 2'-O-methyl modified nucleotide
  modified_base 80: mod_base = OTHER; note = 2'-O-methyl modified nucleotide
  modified_base 81: mod_base = OTHER; note = 2'-O-methyl modified nucleotide
  modified_base 82: mod_base = OTHER; note = 2'-O-methyl modified nucleotide
  modified_base 83: mod_base = OTHER; note = 2'-O-methyl modified nucleotide
  modified_base 84: mod_base = OTHER; note = 2'-O-methyl modified nucleotide
  modified_base 85: mod_base = OTHER; note = 2'-O-methyl modified nucleotide
  modified_base 86: mod_base = OTHER; note = 2'-O-methyl modified nucleotide
  modified_base 87: mod_base = OTHER; note = 2'-O-methyl modified nucleotide
  modified_base 88: mod_base = OTHER; note = 2'-O-methyl modified nucleotide
  modified_base 89: mod_base = OTHER; note = 2'-O-methyl modified nucleotide
  modified_base 90: mod_base = OTHER; note = 2'-O-methyl modified nucleotide
  modified_base 91: mod_base = OTHER; note = 2'-O-methyl modified nucleotide
  modified_base 92: mod_base = OTHER; note = 2'-O-methyl modified nucleotide
  modified_base 93: mod_base = OTHER; note = 2'-O-methyl modified nucleotide
  modified_base 94: mod_base = OTHER; note = 2'-O-methyl modified nucleotide
  modified_base 95: mod_base = OTHER; note = 2'-O-methyl modified nucleotide
  modified_base 96: mod_base = OTHER; note = 2'-O-methyl modified nucleotide
  modified_base 128: mod_base = OTHER; note = Nucleotide with phosphorothioate linkage
  modified_base 129: mod_base = OTHER; note = 2'-O-methyl modified nucleotide with phosphorothioate linkage
  modified_base 130: mod_base = OTHER; note = 2'-O-methyl modified nucleotide with phosphorothioate linkage
  modified_base 131: mod_base = OTHER; note = 2'-O-methyl modified nucleotide
gagtagcgcgagcacagctagttttagagctagaaatagcaagttaaaataaggctagtccgttatcaacttgaaaaagtggcaccgagtcggtgctctcgctccgtggccttagtaaccctgtgctcgcg

SEQ ID NO: 17856 - RNA, 130 nt, synthetic construct
  source 1..130: mol_type = other RNA
  modified_base 1: mod_base = OTHER; note = 2'-O-methyl modified nucleotide with phosphorothioate linkage
  modified_base 2: mod_base = OTHER; note = 2'-O-methyl modified nucleotide with phosphorothioate linkage
  modified_base 3: mod_base = OTHER; note = 2'-O-methyl modified nucleotide with phosphorothioate linkage
  modified_base 29: mod_base = OTHER; note = 2'-O-methyl modified nucleotide
  modified_base 30: mod_base = OTHER; note = 2'-O-methyl modified nucleotide
  modified_base 31: mod_base = OTHER; note = 2'-O-methyl modified nucleotide
  modified_base 32: mod_base = OTHER; note = 2'-O-methyl modified nucleotide
  modified_base 33: mod_base = OTHER; note = 2'-O-methyl modified nucleotide
  modified_base 34: mod_base = OTHER; note = 2'-O-methyl modified nucleotide
  modified_base 35: mod_base = OTHER; note = 2'-O-methyl modified nucleotide
  modified_base 36: mod_base = OTHER; note = 2'-O-methyl modified nucleotide
  modified_base 37: mod_base = OTHER; note = 2'-O-methyl modified nucleotide
  modified_base 38: mod_base = OTHER; note = 2'-O-methyl modified nucleotide
  modified_base 39: mod_base = OTHER; note = 2'-O-methyl modified nucleotide
  modified_base 40: mod_base = OTHER; note = 2'-O-methyl modified nucleotide
  modified_base 69: mod_base = OTHER; note = 2'-O-methyl modified nucleotide
  modified_base 70: mod_base = OTHER; note = 2'-O-methyl modified nucleotide
  modified_base 71: mod_base = OTHER; note = 2'-O-methyl modified nucleotide
  modified_base 72: mod_base = OTHER; note = 2'-O-methyl modified nucleotide
  modified_base 73: mod_base = OTHER; note = 2'-O-methyl modified nucleotide
  modified_base 74: mod_base = OTHER; note = 2'-O-methyl modified nucleotide
  modified_base 75: mod_base = OTHER; note = 2'-O-methyl modified nucleotide
  modified_base 76: mod_base = OTHER; note = 2'-O-methyl modified nucleotide
  modified_base 77: mod_base = OTHER; note = 2'-O-methyl modified nucleotide
  modified_base 78: mod_base = OTHER; note = 2'-O-methyl modified nucleotide
  modified_base 79: mod_base = OTHER; note = 2'-O-methyl modified nucleotide
  modified_base 80: mod_base = OTHER; note = 2'-O-methyl modified nucleotide
  modified_base 81: mod_base = OTHER; note = 2'-O-methyl modified nucleotide
  modified_base 82: mod_base = OTHER; note = 2'-O-methyl modified nucleotide
  modified_base 83: mod_base = OTHER; note = 2'-O-methyl modified nucleotide
  modified_base 84: mod_base = OTHER; note = 2'-O-methyl modified nucleotide
  modified_base 85: mod_base = OTHER; note = 2'-O-methyl modified nucleotide
  modified_base 86: mod_base = OTHER; note = 2'-O-methyl modified nucleotide
  modified_base 87: mod_base = OTHER; note = 2'-O-methyl modified nucleotide
  modified_base 88: mod_base = OTHER; note = 2'-O-methyl modified nucleotide
  modified_base 89: mod_base = OTHER; note = 2'-O-methyl modified nucleotide
  modified_base 90: mod_base = OTHER; note = 2'-O-methyl modified nucleotide
  modified_base 91: mod_base = OTHER; note = 2'-O-methyl modified nucleotide
  modified_base 92: mod_base = OTHER; note = 2'-O-methyl modified nucleotide
  modified_base 93: mod_base = OTHER; note = 2'-O-methyl modified nucleotide
  modified_base 94: mod_base = OTHER; note = 2'-O-methyl modified nucleotide
  modified_base 95: mod_base = OTHER; note = 2'-O-methyl modified nucleotide
  modified_base 96: mod_base = OTHER; note = 2'-O-methyl modified nucleotide
  modified_base 127: mod_base = OTHER; note = Nucleotide with phosphorothioate linkage
  modified_base 128: mod_base = OTHER; note = 2'-O-methyl modified nucleotide with phosphorothioate linkage
  modified_base 129: mod_base = OTHER; note = 2'-O-methyl modified nucleotide with phosphorothioate linkage
  modified_base 130: mod_base = OTHER; note = 2'-O-methyl modified nucleotide
gagtagcgcgagcacagctagttttagagctagaaatagcaagttaaaataaggctagtccgttatcaacttgaaaaagtggcaccgagtcggtgctctcgctccgtggccttagtaaccctgtgctcgc

SEQ ID NO: 17857 - RNA, 129 nt, synthetic construct
  source 1..129: mol_type = other RNA
  modified_base 1: mod_base = OTHER; note = 2'-O-methyl modified nucleotide with phosphorothioate linkage
  modified_base 2: mod_base = OTHER; note = 2'-O-methyl modified nucleotide with phosphorothioate linkage
  modified_base 3: mod_base = OTHER; note = 2'-O-methyl modified nucleotide with phosphorothioate linkage
  modified_base 29: mod_base = OTHER; note = 2'-O-methyl modified nucleotide
  modified_base 30: mod_base = OTHER; note = 2'-O-methyl modified nucleotide
  modified_base 31: mod_base = OTHER; note = 2'-O-methyl modified nucleotide
  modified_base 32: mod_base = OTHER; note = 2'-O-methyl modified nucleotide
  modified_base 33: mod_base = OTHER; note = 2'-O-methyl modified nucleotide
  modified_base 34: mod_base = OTHER; note = 2'-O-methyl modified nucleotide
  modified_base 35: mod_base = OTHER; note = 2'-O-methyl modified nucleotide
  modified_base 36: mod_base = OTHER; note = 2'-O-methyl modified nucleotide
  modified_base 37: mod_base = OTHER; note = 2'-O-methyl modified nucleotide
  modified_base 38: mod_base = OTHER; note = 2'-O-methyl modified nucleotide
  modified_base 39: mod_base = OTHER; note = 2'-O-methyl modified nucleotide
  modified_base 40: mod_base = OTHER; note = 2'-O-methyl modified nucleotide
  modified_base 69: mod_base = OTHER; note = 2'-O-methyl modified nucleotide
  modified_base 70: mod_base = OTHER; note = 2'-O-methyl modified nucleotide
  modified_base 71: mod_base = OTHER; note = 2'-O-methyl modified nucleotide
  modified_base 72: mod_base = OTHER; note = 2'-O-methyl modified nucleotide
  modified_base 73: mod_base = OTHER; note = 2'-O-methyl modified nucleotide
  modified_base 74: mod_base = OTHER; note = 2'-O-methyl modified nucleotide
  modified_base 75: mod_base = OTHER; note = 2'-O-methyl modified nucleotide
  modified_base 76: mod_base = OTHER; note = 2'-O-methyl modified nucleotide
  modified_base 77: mod_base = OTHER; note = 2'-O-methyl modified nucleotide
  modified_base 78: mod_base = OTHER; note = 2'-O-methyl modified nucleotide
  modified_base 79: mod_base = OTHER; note = 2'-O-methyl modified nucleotide
  modified_base 80: mod_base = OTHER; note = 2'-O-methyl modified nucleotide
  modified_base 81: mod_base = OTHER; note = 2'-O-methyl modified nucleotide
  modified_base 82: mod_base = OTHER; note = 2'-O-methyl modified nucleotide
  modified_base 83: mod_base = OTHER; note = 2'-O-methyl modified nucleotide
  modified_base 84: mod_base = OTHER; note = 2'-O-methyl modified nucleotide
  modified_base 85: mod_base = OTHER; note = 2'-O-methyl modified nucleotide
  modified_base 86: mod_base = OTHER; note = 2'-O-methyl modified nucleotide
  modified_base 87: mod_base = OTHER; note = 2'-O-methyl modified nucleotide
  modified_base 88: mod_base = OTHER; note = 2'-O-methyl modified nucleotide
  modified_base 89: mod_base = OTHER; note = 2'-O-methyl modified nucleotide
  modified_base 90: mod_base = OTHER; note = 2'-O-methyl modified nucleotide
  modified_base 91: mod_base = OTHER; note = 2'-O-methyl modified nucleotide
  modified_base 92: mod_base = OTHER; note = 2'-O-methyl modified nucleotide
  modified_base 93: mod_base = OTHER; note = 2'-O-methyl modified nucleotide
  modified_base 94: mod_base = OTHER; note = 2'-O-methyl modified nucleotide
  modified_base 95: mod_base = OTHER; note = 2'-O-methyl modified nucleotide
  modified_base 96: mod_base = OTHER; note = 2'-O-methyl modified nucleotide
  modified_base 126: mod_base = OTHER; note = Nucleotide with phosphorothioate linkage
  modified_base 127: mod_base = OTHER; note = 2'-O-methyl modified nucleotide with phosphorothioate linkage
  modified_base 128: mod_base = OTHER; note = 2'-O-methyl modified nucleotide with phosphorothioate linkage
  modified_base 129: mod_base = OTHER; note = 2'-O-methyl modified nucleotide
gagtagcgcgagcacagctagttttagagctagaaatagcaagttaaaataaggctagtccgttatcaacttgaaaaagtggcaccgagtcggtgctctcgctccgtggccttagtaaccctgtgctcg

SEQ ID NO: 17858 - RNA, 128 nt, synthetic construct
  source 1..128: mol_type = other RNA
  modified_base 1: mod_base = OTHER; note = 2'-O-methyl modified nucleotide with phosphorothioate linkage
  modified_base 2: mod_base = OTHER; note = 2'-O-methyl modified nucleotide with phosphorothioate linkage
  modified_base 3: mod_base = OTHER; note = 2'-O-methyl modified nucleotide with phosphorothioate linkage
  modified_base 29: mod_base = OTHER; note = 2'-O-methyl modified nucleotide
  modified_base 30: mod_base = OTHER; note = 2'-O-methyl modified nucleotide
  modified_base 31: mod_base = OTHER; note = 2'-O-methyl modified nucleotide
  modified_base 32: mod_base = OTHER; note = 2'-O-methyl modified nucleotide
  modified_base 33: mod_base = OTHER; note = 2'-O-methyl modified nucleotide
  modified_base 34: mod_base = OTHER; note = 2'-O-methyl modified nucleotide
  modified_base 35: mod_base = OTHER; note = 2'-O-methyl modified nucleotide
  modified_base 36: mod_base = OTHER; note = 2'-O-methyl modified nucleotide
  modified_base 37: mod_base = OTHER; note = 2'-O-methyl modified nucleotide
  modified_base 38: mod_base = OTHER; note = 2'-O-methyl modified nucleotide
  modified_base 39: mod_base = OTHER; note = 2'-O-methyl modified nucleotide
  modified_base 40: mod_base = OTHER; note = 2'-O-methyl modified nucleotide
  modified_base 69: mod_base = OTHER; note = 2'-O-methyl modified nucleotide
  modified_base 70: mod_base = OTHER; note = 2'-O-methyl modified nucleotide
  modified_base 71: mod_base = OTHER; note = 2'-O-methyl modified nucleotide
  modified_base 72: mod_base = OTHER; note = 2'-O-methyl modified nucleotide
  modified_base 73: mod_base = OTHER; note = 2'-O-methyl modified nucleotide
  modified_base 74: mod_base = OTHER; note = 2'-O-methyl modified nucleotide
  modified_base 75: mod_base = OTHER; note = 2'-O-methyl modified nucleotide
  modified_base 76: mod_base = OTHER; note = 2'-O-methyl modified nucleotide
  modified_base 77: mod_base = OTHER; note = 2'-O-methyl modified nucleotide
  modified_base 78: mod_base = OTHER; note = 2'-O-methyl modified nucleotide
  modified_base 79: mod_base = OTHER; note = 2'-O-methyl modified nucleotide
  modified_base 80: mod_base = OTHER; note = 2'-O-methyl modified nucleotide
  modified_base 81: mod_base = OTHER; note = 2'-O-methyl modified nucleotide
  modified_base 82: mod_base = OTHER; note = 2'-O-methyl modified nucleotide
  modified_base 83: mod_base = OTHER; note = 2'-O-methyl modified nucleotide
  modified_base 84: mod_base = OTHER; note = 2'-O-methyl modified nucleotide
  modified_base 85: mod_base = OTHER; note = 2'-O-methyl modified nucleotide
  modified_base 86: mod_base = OTHER; note = 2'-O-methyl modified nucleotide
  modified_base 87: mod_base = OTHER; note = 2'-O-methyl modified nucleotide
  modified_base 88: mod_base = OTHER; note = 2'-O-methyl modified nucleotide
  modified_base 89: mod_base = OTHER; note = 2'-O-methyl modified nucleotide
  modified_base 90: mod_base = OTHER; note = 2'-O-methyl modified nucleotide
  modified_base 91: mod_base = OTHER; note = 2'-O-methyl modified nucleotide
  modified_base 92: mod_base = OTHER; note = 2'-O-methyl modified nucleotide
  modified_base 93: mod_base = OTHER; note = 2'-O-methyl modified nucleotide
  modified_base 94: mod_base = OTHER; note = 2'-O-methyl modified nucleotide
  modified_base 95: mod_base = OTHER; note = 2'-O-methyl modified nucleotide
  modified_base 96: mod_base = OTHER; note = 2'-O-methyl modified nucleotide
  modified_base 125: mod_base = OTHER; note = Nucleotide with phosphorothioate linkage
  modified_base 126: mod_base = OTHER; note = 2'-O-methyl modified nucleotide with phosphorothioate linkage
  modified_base 127: mod_base = OTHER; note = 2'-O-methyl modified nucleotide with phosphorothioate linkage
  modified_base 128: mod_base = OTHER; note = 2'-O-methyl modified nucleotide
gagtagcgcgagcacagctagttttagagctagaaatagcaagttaaaataaggctagtccgttatcaacttgaaaaagtggcaccgagtcggtgctctcgctccgtggccttagtaaccctgtgctc

SEQ ID NO: 17859 - RNA, 120 nt, synthetic construct; identical to SEQ ID NO: 17523
  source 1..120: mol_type = other RNA

SEQ ID NO: 17860 - RNA, 119 nt, synthetic construct; identical to SEQ ID NO: 17524
  source 1..119: mol_type = other RNA

SEQ ID NO: 17861 - RNA, 118 nt, synthetic construct; identical to SEQ ID NO: 17525
  source 1..118: mol_type = other RNA

SEQ ID NO: 17862 - RNA, 117 nt, synthetic construct; identical to SEQ ID NO: 17526
  source 1..117: mol_type = other RNA

SEQ ID NO: 17863 - RNA, 116 nt, synthetic construct; identical to SEQ ID NO: 17527
  source 1..116: mol_type = other RNA

SEQ ID NO: 17864 - RNA, 115 nt, synthetic construct; identical to SEQ ID NO: 17528
  source 1..115: mol_type = other RNA

SEQ ID NO: 17865 - RNA, 122 nt, synthetic construct; identical to SEQ ID NO: 17529
  source 1..122: mol_type = other RNA

SEQ ID NO: 17866 - RNA, 121 nt, synthetic construct; identical to SEQ ID NO: 17530
  source 1..121: mol_type = other RNA

SEQ ID NO: 17867 - RNA, 120 nt, synthetic construct; identical to SEQ ID NO: 17531
  source 1..120: mol_type = other RNA

SEQ ID NO: 17868 - RNA, 119 nt, synthetic construct; identical to SEQ ID NO: 17532
  source 1..119: mol_type = other RNA

SEQ ID NO: 17869 - RNA, 118 nt, synthetic construct; identical to SEQ ID NO: 17533
  source 1..118: mol_type = other RNA

SEQ ID NO: 17870 - RNA, 117 nt, synthetic construct; identical to SEQ ID NO: 17534
  source 1..117: mol_type = other RNA

SEQ ID NO: 17871 - RNA, 124 nt, synthetic construct; identical to SEQ ID NO: 17535
  source 1..124: mol_type = other RNA

SEQ ID NO: 17872 - RNA, 123 nt, synthetic construct; identical to SEQ ID NO: 17536
  source 1..123: mol_type = other RNA

SEQ ID NO: 17873 - RNA, 122 nt, synthetic construct; identical to SEQ ID NO: 17537
  source 1..122: mol_type = other RNA

SEQ ID NO: 17874 - RNA, 121 nt, synthetic construct; identical to SEQ ID NO: 17538
  source 1..121: mol_type = other RNA

SEQ ID NO: 17875 - RNA, 120 nt, synthetic construct; identical to SEQ ID NO: 17539
  source 1..120: mol_type = other RNA

SEQ ID NO: 17876 - RNA, 119 nt, synthetic construct; identical to SEQ ID NO: 17540
  source 1..119: mol_type = other RNA

SEQ ID NO: 17877 - RNA, 126 nt, synthetic construct; identical to SEQ ID NO: 17541
  source 1..126: mol_type = other RNA

SEQ ID NO: 17878 - RNA, 125 nt, synthetic construct; identical to SEQ ID NO: 17542
  source 1..125: mol_type = other RNA

SEQ ID NO: 17879 - RNA, 124 nt, synthetic construct; identical to SEQ ID NO: 17543
  source 1..124: mol_type = other RNA

SEQ ID NO: 17880 - RNA, 123 nt, synthetic construct; identical to SEQ ID NO: 17544
  source 1..123: mol_type = other RNA

SEQ ID NO: 17881 - RNA, 122 nt, synthetic construct; identical to SEQ ID NO: 17545
  source 1..122: mol_type = other RNA

SEQ ID NO: 17882 - RNA, 121 nt, synthetic construct; identical to SEQ ID NO: 17546
  source 1..121: mol_type = other RNA

SEQ ID NO: 17883 - RNA, 128 nt, synthetic construct; identical to SEQ ID NO: 17547
  source 1..128: mol_type = other RNA

SEQ ID NO: 17884 - RNA, 127 nt, synthetic construct; identical to SEQ ID NO: 17548
  source 1..127: mol_type = other RNA

SEQ ID NO: 17885 - RNA, 126 nt, synthetic construct; identical to SEQ ID NO: 17549
  source 1..126: mol_type = other RNA

SEQ ID NO: 17886 - RNA, 125 nt, synthetic construct; identical to SEQ ID NO: 17550
  source 1..125: mol_type = other RNA

SEQ ID NO: 17887 - RNA, 124 nt, synthetic construct; identical to SEQ ID NO: 17551
  source 1..124: mol_type = other RNA

SEQ ID NO: 17888 - RNA, 123 nt, synthetic construct; identical to SEQ ID NO: 17552
  source 1..123: mol_type = other RNA

SEQ ID NO: 17889 - RNA, 130 nt, synthetic construct; identical to SEQ ID NO: 17553
  source 1..130: mol_type = other RNA

SEQ ID NO: 17890 - RNA, 129 nt, synthetic construct; identical to SEQ ID NO: 17554
  source 1..129: mol_type = other RNA

SEQ ID NO: 17891 - RNA, 128 nt, synthetic construct; identical to SEQ ID NO: 17555
  source 1..128: mol_type = other RNA

SEQ ID NO: 17892 - RNA, 127 nt, synthetic construct; identical to SEQ ID NO: 17556
  source 1..127: mol_type = other RNA

SEQ ID NO: 17893 - RNA, 126 nt, synthetic construct; identical to SEQ ID NO: 17557
  source 1..126: mol_type = other RNA

SEQ ID NO: 17894 - RNA, 125 nt, synthetic construct; identical to SEQ ID NO: 17558
  source 1..125: mol_type = other RNA

SEQ ID NO: 17895 - RNA, 132 nt, synthetic construct; identical to SEQ ID NO: 17559
  source 1..132: mol_type = other RNA

SEQ ID NO: 17896 - RNA, 131 nt, synthetic construct; identical to SEQ ID NO: 17560
  source 1..131: mol_type = other RNA

SEQ ID NO: 17897 - RNA, 130 nt, synthetic construct; identical to SEQ ID NO: 17561
  source 1..130: mol_type = other RNA

SEQ ID NO: 17898 - RNA, 129 nt, synthetic construct; identical to SEQ ID NO: 17562
  source 1..129: mol_type = other RNA

SEQ ID NO: 17899 - RNA, 128 nt, synthetic construct; identical to SEQ ID NO: 17563
  source 1..128: mol_type = other RNA

SEQ ID NO: 17900 - RNA, 127 nt, synthetic construct; identical to SEQ ID NO: 17564
  source 1..127: mol_type = other RNA

SEQ ID NO: 17901 - RNA, 120 nt, synthetic construct; identical to SEQ ID NO: 17565
  source 1..120: mol_type = other RNA

SEQ ID NO: 17902 - RNA, 119 nt, synthetic construct; identical to SEQ ID NO: 17566
  source 1..119: mol_type = other RNA

SEQ ID NO: 17903 - RNA, 118 nt, synthetic construct; identical to SEQ ID NO: 17567
  source 1..118: mol_type = other RNA

SEQ ID NO: 17904 - RNA, 117 nt, synthetic construct; identical to SEQ ID NO: 17568
  source 1..117: mol_type = other RNA

SEQ ID NO: 17905 - RNA, 116 nt, synthetic construct; identical to SEQ ID NO: 17569
  source 1..116: mol_type = other RNA

SEQ ID NO: 17906 - RNA, 115 nt, synthetic construct; identical to SEQ ID NO: 17570
  source 1..115: mol_type = other RNA

SEQ ID NO: 17907 - RNA, 122 nt, synthetic construct; identical to SEQ ID NO: 17571
  source 1..122: mol_type = other RNA

SEQ ID NO: 17908 - RNA, 121 nt, synthetic construct; identical to SEQ ID NO: 17572
  source 1..121: mol_type = other RNA

SEQ ID NO: 17909 - RNA, 120 nt, synthetic construct; identical to SEQ ID NO: 17573
  source 1..120: mol_type = other RNA

SEQ ID NO: 17910 - RNA, 119 nt, synthetic construct; identical to SEQ ID NO: 17574
  source 1..119: mol_type = other RNA

SEQ ID NO: 17911 - RNA, 118 nt, synthetic construct; identical to SEQ ID NO: 17575
  source 1..118: mol_type = other RNA

SEQ ID NO: 17912 - RNA, 117 nt, synthetic construct; identical to SEQ ID NO: 17576
  source 1..117: mol_type = other RNA

SEQ ID NO: 17913 - RNA, 124 nt, synthetic construct; identical to SEQ ID NO: 17577
  source 1..124: mol_type = other RNA

SEQ ID NO: 17914 - RNA, 123 nt, synthetic construct; identical to SEQ ID NO: 17578
  source 1..123: mol_type = other RNA

SEQ ID NO: 17915 - RNA, 122 nt, synthetic construct; identical to SEQ ID NO: 17579
  source 1..122: mol_type = other RNA

SEQ ID NO: 17916 - RNA, 121 nt, synthetic construct; identical to SEQ ID NO: 17580
  source 1..121: mol_type = other RNA

SEQ ID NO: 17917 - RNA, 120 nt, synthetic construct; identical to SEQ ID NO: 17581
  source 1..120: mol_type = other RNA

SEQ ID NO: 17918 - RNA, 119 nt, synthetic construct; identical to SEQ ID NO: 17582
  source 1..119: mol_type = other RNA

SEQ ID NO: 17919 - RNA, 126 nt, synthetic construct; identical to SEQ ID NO: 17583
  source 1..126: mol_type = other RNA

SEQ ID NO: 17920 - RNA, 125 nt, synthetic construct; identical to SEQ ID NO: 17584
  source 1..125: mol_type = other RNA

SEQ ID NO: 17921 - RNA, 124 nt, synthetic construct; identical to SEQ ID NO: 17585
  source 1..124: mol_type = other RNA

SEQ ID NO: 17922 - RNA, 123 nt, synthetic construct; identical to SEQ ID NO: 17586
  source 1..123: mol_type = other RNA

SEQ ID NO: 17923 - RNA, 122 nt, synthetic construct; identical to SEQ ID NO: 17587
  source 1..122: mol_type = other RNA

SEQ ID NO: 17924 - RNA, 121 nt, synthetic construct; identical to SEQ ID NO: 17588
  source 1..121: mol_type = other RNA

SEQ ID NO: 17925 - RNA, 128 nt, synthetic construct; identical to SEQ ID NO: 17589
  source 1..128: mol_type = other RNA

SEQ ID NO: 17926 - RNA, 127 nt, synthetic construct; identical to SEQ ID NO: 17590
  source 1..127: mol_type = other RNA

SEQ ID NO: 17927 - RNA, 126 nt, synthetic construct; identical to SEQ ID NO: 17591
  source 1..126: mol_type = other RNA

SEQ ID NO: 17928 - RNA, 125 nt, synthetic construct; identical to SEQ ID NO: 17592
  source 1..125: mol_type = other RNA

SEQ ID NO: 17929 - RNA, 124 nt, synthetic construct; identical to SEQ ID NO: 17593
  source 1..124: mol_type = other RNA

SEQ ID NO: 17930 - RNA, 123 nt, synthetic construct; identical to SEQ ID NO: 17594
  source 1..123: mol_type = other RNA

SEQ ID NO: 17931 - RNA, 130 nt, synthetic construct; identical to SEQ ID NO: 17595
  source 1..130: mol_type = other RNA

SEQ ID NO: 17932 - RNA, 129 nt, synthetic construct; identical to SEQ ID NO: 17596
  source 1..129: mol_type = other RNA

SEQ ID NO: 17933 - RNA, 128 nt, synthetic construct; identical to SEQ ID NO: 17597
  source 1..128: mol_type = other RNA

SEQ ID NO: 17934 - RNA, 127 nt, synthetic construct; identical to SEQ ID NO: 17598
  source 1..127: mol_type = other RNA

SEQ ID NO: 17935 - RNA, 126 nt, synthetic construct; identical to SEQ ID NO: 17599
  source 1..126: mol_type = other RNA

SEQ ID NO: 17936 - RNA, 125 nt, synthetic construct; identical to SEQ ID NO: 17600
  source 1..125: mol_type = other RNA

SEQ ID NO: 17937 - RNA, 132 nt, synthetic construct; identical to SEQ ID NO: 17601
  source 1..132: mol_type = other RNA

SEQ ID NO: 17938 - RNA, 131 nt, synthetic construct; identical to SEQ ID NO: 17602
  source 1..131: mol_type = other RNA

SEQ ID NO: 17939 - RNA, 130 nt, synthetic construct; identical to SEQ ID NO: 17603
  source 1..130: mol_type = other RNA

SEQ ID NO: 17940 - RNA, 129 nt, synthetic construct; identical to SEQ ID NO: 17604
  source 1..129: mol_type = other RNA

SEQ ID NO: 17941 - RNA, 128 nt, synthetic construct; identical to SEQ ID NO: 17605
  source 1..128: mol_type = other RNA

SEQ ID NO: 17942 - RNA, 127 nt, synthetic construct; identical to SEQ ID NO: 17606
  source 1..127: mol_type = other RNA

SEQ ID NO: 17943 - RNA, 121 nt, synthetic construct; identical to SEQ ID NO: 17607
  source 1..121: mol_type = other RNA

SEQ ID NO: 17944 - RNA, 120 nt, synthetic construct; identical to SEQ ID NO: 17608
  source 1..120: mol_type = other RNA

SEQ ID NO: 17945 - RNA, 119 nt, synthetic construct; identical to SEQ ID NO: 17609
  source 1..119: mol_type = other RNA

SEQ ID NO: 17946 - RNA, 118 nt, synthetic construct; identical to SEQ ID NO: 17610
  source 1..118: mol_type = other RNA

SEQ ID NO: 17947 - RNA, 117 nt, synthetic construct; identical to SEQ ID NO: 17611
  source 1..117: mol_type = other RNA

SEQ ID NO: 17948 - RNA, 116 nt, synthetic construct; identical to SEQ ID NO: 17612
  source 1..116: mol_type = other RNA

SEQ ID NO: 17949 - RNA, 123 nt, synthetic construct; identical to SEQ ID NO: 17613
  source 1..123: mol_type = other RNA

SEQ ID NO: 17950 - RNA, 122 nt, synthetic construct; identical to SEQ ID NO: 17614
  source 1..122: mol_type = other RNA

SEQ ID NO: 17951 - RNA, 121 nt, synthetic construct; identical to SEQ ID NO: 17615
  source 1..121: mol_type = other RNA

SEQ ID NO: 17952 - RNA, 120 nt, synthetic construct; identical to SEQ ID NO: 17616
  source 1..120: mol_type = other RNA

SEQ ID NO: 17953 - RNA, 119 nt, synthetic construct; identical to SEQ ID NO: 17617
  source 1..119: mol_type = other RNA

SEQ ID NO: 17954 - RNA, 118 nt, synthetic construct; identical to SEQ ID NO: 17618
  source 1..118: mol_type = other RNA

SEQ ID NO: 17955 - RNA, 125 nt, synthetic construct; identical to SEQ ID NO: 17619
  source 1..125: mol_type = other RNA

SEQ ID NO: 17956 - RNA, 124 nt, synthetic construct; identical to SEQ ID NO: 17620
  source 1..124: mol_type = other RNA

SEQ ID NO: 17957 - RNA, 123 nt, synthetic construct; identical to SEQ ID NO: 17621
  source 1..123: mol_type = other RNA

SEQ ID NO: 17958 - RNA, 122 nt, synthetic construct; identical to SEQ ID NO: 17622
  source 1..122: mol_type = other RNA

SEQ ID NO: 17959 - RNA, 121 nt, synthetic construct; identical to SEQ ID NO: 17623
  source 1..121: mol_type = other RNA

SEQ ID NO: 17960 - RNA, 120 nt, synthetic construct; identical to SEQ ID NO: 17624
  source 1..120: mol_type = other RNA

SEQ ID NO: 17961 - RNA, 127 nt, synthetic construct; identical to SEQ ID NO: 17625
  source 1..127: mol_type = other RNA

SEQ ID NO: 17962 - RNA, 126 nt, synthetic construct; identical to SEQ ID NO: 17626
  source 1..126: mol_type = other RNA

SEQ ID NO: 17963 - RNA, 125 nt, synthetic construct; identical to SEQ ID NO: 15005
  source 1..125: mol_type = other RNA

SEQ ID NO: 17964 - RNA, 124 nt, synthetic construct; identical to SEQ ID NO: 17628
  source 1..124: mol_type = other RNA

SEQ ID NO: 17965 - RNA, 123 nt, synthetic construct; identical to SEQ ID NO: 17629
  source 1..123: mol_type = other RNA

SEQ ID NO: 17966 - RNA, 122 nt, synthetic construct; identical to SEQ ID NO: 17630
  source 1..122: mol_type = other RNA

SEQ ID NO: 17967 - RNA, 129 nt, synthetic construct; identical to SEQ ID NO: 17631
  source 1..129: mol_type = other RNA

SEQ ID NO: 17968 - RNA, 128 nt, synthetic construct; identical to SEQ ID NO: 17632
  source 1..128: mol_type = other RNA

SEQ ID NO: 17969 - RNA, 127 nt, synthetic construct; identical to SEQ ID NO: 17633
  source 1..127: mol_type = other RNA

SEQ ID NO: 17970 - RNA, 126 nt, synthetic construct; identical to SEQ ID NO: 17634
  source 1..126: mol_type = other RNA

SEQ ID NO: 17971 - RNA, 125 nt, synthetic construct; identical to SEQ ID NO: 17635
  source 1..125: mol_type = other RNA

SEQ ID NO: 17972 - RNA, 124 nt, synthetic construct; identical to SEQ ID NO: 17636
  source 1..124: mol_type = other RNA

SEQ ID NO: 17973 - RNA, 131 nt, synthetic construct; identical to SEQ ID NO: 17637
  source 1..131: mol_type = other RNA

SEQ ID NO: 17974 - RNA, 130 nt, synthetic construct; identical to SEQ ID NO: 17638
  source 1..130: mol_type = other RNA

SEQ ID NO: 17975 - RNA, 129 nt, synthetic construct; identical to SEQ ID NO: 17639
  source 1..129: mol_type = other RNA

SEQ ID NO: 17976 - RNA, 128 nt, synthetic construct; identical to SEQ ID NO: 17640
  source 1..128: mol_type = other RNA

SEQ ID NO: 17977 - RNA, 127 nt, synthetic construct; identical to SEQ ID NO: 17641
  source 1..127: mol_type = other RNA

SEQ ID NO: 17978 - RNA, 126 nt, synthetic construct; identical to SEQ ID NO: 17642
  source 1..126: mol_type = other RNA

SEQ ID NO: 17979 - RNA, 133 nt, synthetic construct; identical to SEQ ID NO: 17643
  source 1..133: mol_type = other RNA

SEQ ID NO: 17980 - RNA, 132 nt, synthetic construct; identical to SEQ ID NO: 17644
  source 1..132: mol_type = other RNA

SEQ ID NO: 17981 - RNA, 131 nt, synthetic construct; identical to SEQ ID NO: 17645
  source 1..131: mol_type = other RNA

SEQ ID NO: 17982 - RNA, 130 nt, synthetic construct; identical to SEQ ID NO: 17646
  source 1..130: mol_type = other RNA

SEQ ID NO: 17983 - RNA, 129 nt, synthetic construct; identical to SEQ ID NO: 17647
  source 1..129: mol_type = other RNA

SEQ ID NO: 17984 - RNA, 128 nt, synthetic construct; identical to SEQ ID NO: 17648
  source 1..128: mol_type = other RNA

SEQ ID NO: 17985 - RNA, 121 nt, synthetic construct; identical to SEQ ID NO: 17649
  source 1..121: mol_type = other RNA

SEQ ID NO: 17986 - RNA, 120 nt, synthetic construct; identical to SEQ ID NO: 17650
  source 1..120: mol_type = other RNA

SEQ ID NO: 17987 - RNA, 119 nt, synthetic construct; identical to SEQ ID NO: 17651
  source 1..119: mol_type = other RNA

SEQ ID NO: 17988 - RNA, 118 nt, synthetic construct; identical to SEQ ID NO: 17652
  source 1..118: mol_type = other RNA

SEQ ID NO: 17989 - RNA, 117 nt, synthetic construct; identical to SEQ ID NO: 17653
  source 1..117: mol_type = other RNA

SEQ ID NO: 17990 - RNA, 116 nt, synthetic construct; identical to SEQ ID NO: 17654
  source 1..116: mol_type = other RNA

SEQ ID NO: 17991 - RNA, 123 nt, synthetic construct; identical to SEQ ID NO: 17655
  source 1..123: mol_type = other RNA

SEQ ID NO: 17992 - RNA, 122 nt, synthetic construct; identical to SEQ ID NO: 17656
  source 1..122: mol_type = other RNA

SEQ ID NO: 17993 - RNA, 121 nt, synthetic construct; identical to SEQ ID NO: 17657
  source 1..121: mol_type = other RNA

SEQ ID NO: 17994 - RNA, 120 nt, synthetic construct; identical to SEQ ID NO: 17658
  source 1..120: mol_type = other RNA

SEQ ID NO: 17995 - RNA, 119 nt, synthetic construct; identical to SEQ ID NO: 17659
  source 1..119: mol_type = other RNA

SEQ ID NO: 17996 - RNA, 118 nt, synthetic construct; identical to SEQ ID NO: 17660
  source 1..118: mol_type = other RNA

SEQ ID NO: 17997 - RNA, 125 nt, synthetic construct; identical to SEQ ID NO: 17661
  source 1..125: mol_type = other RNA

SEQ ID NO: 17998 - RNA, 124 nt, synthetic construct; identical to SEQ ID NO: 17662
  source 1..124: mol_type = other RNA

SEQ ID NO: 17999 - RNA, 123 nt, synthetic construct; identical to SEQ ID NO: 17663
  source 1..123: mol_type = other RNA

SEQ ID NO: 18000 - RNA, 122 nt, synthetic construct; identical to SEQ ID NO: 17664
  source 1..122: mol_type = other RNA

SEQ ID NO: 18001 - RNA, 121 nt, synthetic construct; identical to SEQ ID NO: 17665
  source 1..121: mol_type = other RNA

SEQ ID NO: 18002 - RNA, 120 nt, synthetic construct; identical to SEQ ID NO: 17666
  source 1..120: mol_type = other RNA

SEQ ID NO: 18003 - RNA, 127 nt, synthetic construct; identical to SEQ ID NO: 17667
  source 1..127: mol_type = other RNA

SEQ ID NO: 18004 - RNA, 126 nt, synthetic construct; identical to SEQ ID NO: 17668
  source 1..126: mol_type = other RNA

SEQ ID NO: 18005 - RNA, 125 nt, synthetic construct; identical to SEQ ID NO: 17669
  source 1..125: mol_type = other RNA

SEQ ID NO: 18006 - RNA, 124 nt, synthetic construct; identical to SEQ ID NO: 17670
  source 1..124: mol_type = other RNA

SEQ ID NO: 18007 - RNA, 123 nt, synthetic construct; identical to SEQ ID NO: 17671
  source 1..123: mol_type = other RNA

SEQ ID NO: 18008 - RNA, 122 nt, synthetic construct; identical to SEQ ID NO: 17672
  source 1..122: mol_type = other RNA

SEQ ID NO: 18009 - RNA, 129 nt, synthetic construct; identical to SEQ ID NO: 17673
  source 1..129: mol_type = other RNA

SEQ ID NO: 18010 - RNA, 128 nt, synthetic construct; identical to SEQ ID NO: 17674
  source 1..128: mol_type = other RNA

SEQ ID NO: 18011 - RNA, 127 nt, synthetic construct; identical to SEQ ID NO: 17675
  source 1..127: mol_type = other RNA

SEQ ID NO: 18012 - RNA, 126 nt, synthetic construct; identical to SEQ ID NO: 17676
  source 1..126: mol_type = other RNA

SEQ ID NO: 18013 - RNA, 125 nt, synthetic construct; identical to SEQ ID NO: 17677
  source 1..125: mol_type = other RNA

SEQ ID NO: 18014 - RNA, 124 nt, synthetic construct; identical to SEQ ID NO: 17678
  source 1..124: mol_type = other RNA

SEQ ID NO: 18015 - RNA, 131 nt, synthetic construct; identical to SEQ ID NO: 17679
  source 1..131: mol_type = other RNA

SEQ ID NO: 18016 - RNA, 130 nt, synthetic construct; identical to SEQ ID NO: 17680
  source 1..130: mol_type = other RNA

SEQ ID NO: 18017 - RNA, 129 nt, synthetic construct; identical to SEQ ID NO: 17681
  source 1..129: mol_type = other RNA

SEQ ID NO: 18018 - RNA, 128 nt, synthetic construct; identical to SEQ ID NO: 17682
  source 1..128: mol_type = other RNA

SEQ ID NO: 18019 - RNA, 127 nt, synthetic construct; identical to SEQ ID NO: 17683
  source 1..127: mol_type = other RNA

SEQ ID NO: 18020 - RNA, 126 nt, synthetic construct; identical to SEQ ID NO: 17684
  source 1..126: mol_type = other RNA

SEQ ID NO: 18021 - RNA, 133 nt, synthetic construct; identical to SEQ ID NO: 17685
  source 1..133: mol_type = other RNA

SEQ ID NO: 18022 - RNA, 132 nt, synthetic construct; identical to SEQ ID NO: 17686
  source 1..132: mol_type = other RNA

SEQ ID NO: 18023 - RNA, 131 nt, synthetic construct; identical to SEQ ID NO: 17687
  source 1..131: mol_type = other RNA

SEQ ID NO: 18024 - RNA, 130 nt, synthetic construct; identical to SEQ ID NO: 17688
  source 1..130: mol_type = other RNA

SEQ ID NO: 18025 - RNA, 129 nt, synthetic construct; identical to SEQ ID NO: 17689
  source 1..129: mol_type = other RNA

SEQ ID NO: 18026 - RNA, 128 nt, synthetic construct; identical to SEQ ID NO: 17690
  source 1..128: mol_type = other RNA

SEQ ID NO: 18027 - RNA, 120 nt, synthetic construct; identical to SEQ ID NO: 17691
  source 1..120: mol_type = other RNA

SEQ ID NO: 18028 - RNA, 119 nt, synthetic construct; identical to SEQ ID NO: 17692
  source 1..119: mol_type = other RNA

SEQ ID NO: 18029 - RNA, 118 nt, synthetic construct; identical to SEQ ID NO: 17693
  source 1..118: mol_type = other RNA

SEQ ID NO: 18030 - RNA, 117 nt, synthetic construct; identical to SEQ ID NO: 17694
  source 1..117: mol_type = other RNA

SEQ ID NO: 18031 - RNA, 116 nt, synthetic construct; identical to SEQ ID NO: 17695
  source 1..116: mol_type = other RNA

SEQ ID NO: 18032 - RNA, 115 nt, synthetic construct; identical to SEQ ID NO: 17696
  source 1..115: mol_type = other RNA

SEQ ID NO: 18033 - RNA, 122 nt, synthetic construct; identical to SEQ ID NO: 17697
  source 1..122: mol_type = other RNA

SEQ ID NO: 18034 - RNA, 121 nt, synthetic construct; identical to SEQ ID NO: 17698
  source 1..121: mol_type = other RNA

SEQ ID NO: 18035 - RNA, 120 nt, synthetic construct; identical to SEQ ID NO: 17699
  source 1..120: mol_type = other RNA

SEQ ID NO: 18036 - RNA, 119 nt, synthetic construct; identical to SEQ ID NO: 17700
  source 1..119: mol_type = other RNA

SEQ ID NO: 18037 - RNA, 118 nt, synthetic construct; identical to SEQ ID NO: 17701
  source 1..118: mol_type = other RNA

SEQ ID NO: 18038 - RNA, 117 nt, synthetic construct; identical to SEQ ID NO: 17702
  source 1..117: mol_type = other RNA

SEQ ID NO: 18039 - RNA, 124 nt, synthetic construct; identical to SEQ ID NO: 17703
  source 1..124: mol_type = other RNA

SEQ ID NO: 18040 - RNA, 123 nt, synthetic construct; identical to SEQ ID NO: 17704
  source 1..123: mol_type = other RNA

SEQ ID NO: 18041 - RNA, 122 nt, synthetic construct; identical to SEQ ID NO: 17705
  source 1..122: mol_type = other RNA

SEQ ID NO: 18042 - RNA, 121 nt, synthetic construct; identical to SEQ ID NO: 17706
  source 1..121: mol_type = other RNA

SEQ ID NO: 18043 - RNA, 120 nt, synthetic construct; identical to SEQ ID NO: 17707
  source 1..120: mol_type = other RNA

SEQ ID NO: 18044 - RNA, 119 nt, synthetic construct; identical to SEQ ID NO: 17708
  source 1..119: mol_type = other RNA

SEQ ID NO: 18045 - RNA, 126 nt, synthetic construct; identical to SEQ ID NO: 17709
  source 1..126: mol_type = other RNA

SEQ ID NO: 18046 - RNA, 125 nt, synthetic construct; identical to SEQ ID NO: 17710
  source 1..125: mol_type = other RNA

SEQ ID NO: 18047 - RNA, 124 nt, synthetic construct; identical to SEQ ID NO: 17711
  source 1..124: mol_type = other RNA

SEQ ID NO: 18048 - RNA, 123 nt, synthetic construct; identical to SEQ ID NO: 17712
  source 1..123: mol_type = other RNA

SEQ ID NO: 18049 - RNA, 122 nt, synthetic construct; identical to SEQ ID NO: 17713
  source 1..122: mol_type = other RNA

SEQ ID NO: 18050 - RNA, 121 nt, synthetic construct; identical to SEQ ID NO: 17714
  source 1..121: mol_type = other RNA

SEQ ID NO: 18051 - RNA, 128 nt, synthetic construct; identical to SEQ ID NO: 17715
  source 1..128: mol_type = other RNA

SEQ ID NO: 18052 - RNA, 127 nt, synthetic construct; identical to SEQ ID NO: 17716
  source 1..127: mol_type = other RNA

SEQ ID NO: 18053 - RNA, 126 nt, synthetic construct; identical to SEQ ID NO: 17717
  source 1..126: mol_type = other RNA

SEQ ID NO: 18054 - RNA, 125 nt, synthetic construct; identical to SEQ ID NO: 17718
  source 1..125: mol_type = other RNA

SEQ ID NO: 18055 - RNA, 124 nt, synthetic construct; identical to SEQ ID NO: 17719
  source 1..124: mol_type = other RNA

SEQ ID NO: 18056 - RNA, 123 nt, synthetic construct; identical to SEQ ID NO: 17720
  source 1..123: mol_type = other RNA

SEQ ID NO: 18057 - RNA, 130 nt, synthetic construct; identical to SEQ ID NO: 17721
  source 1..130: mol_type = other RNA

SEQ ID NO: 18058 - RNA, 129 nt, synthetic construct; identical to SEQ ID NO: 17722
  source 1..129: mol_type = other RNA

SEQ ID NO: 18059 - RNA, 128 nt, synthetic construct; identical to SEQ ID NO: 17723
  source 1..128: mol_type = other RNA

SEQ ID NO: 18060 - RNA, 127 nt, synthetic construct; identical to SEQ ID NO: 17724
  source 1..127: mol_type = other RNA

SEQ ID NO: 18061 - RNA, 126 nt, synthetic construct; identical to SEQ ID NO: 17725
  source 1..126: mol_type = other RNA

SEQ ID NO: 18062 - RNA, 125 nt, synthetic construct; identical to SEQ ID NO: 17726
  source 1..125: mol_type = other RNA

SEQ ID NO: 18063 - RNA, 132 nt, synthetic construct; identical to SEQ ID NO: 17727
  source 1..132: mol_type = other RNA

SEQ ID NO: 18064 - RNA, 131 nt, synthetic construct; identical to SEQ ID NO: 17728
  source 1..131: mol_type = other RNA

SEQ ID NO: 18065 - RNA, 130 nt, synthetic construct; identical to SEQ ID NO: 17729
  source 1..130: mol_type = other RNA

SEQ ID NO: 18066 - RNA, 129 nt, synthetic construct; identical to SEQ ID NO: 17730
  source 1..129: mol_type = other RNA

SEQ ID NO: 18067 - RNA, 128 nt, synthetic construct; identical to SEQ ID NO: 17731
  source 1..128: mol_type = other RNA

SEQ ID NO: 18068 - RNA, 127 nt, synthetic construct; identical to SEQ ID NO: 17732
  source 1..127: mol_type = other RNA

SEQ ID NO: 18069 - RNA, 120 nt, synthetic construct; identical to SEQ ID NO: 17733
  source 1..120: mol_type = other RNA

SEQ ID NO: 18070 - RNA, 119 nt, synthetic construct; identical to SEQ ID NO: 17734
  source 1..119: mol_type = other RNA

SEQ ID NO: 18071 - RNA, 118 nt, synthetic construct; identical to SEQ ID NO: 17735
  source 1..118: mol_type = other RNA

SEQ ID NO: 18072 - RNA, 117 nt, synthetic construct; identical to SEQ ID NO: 17736
  source 1..117: mol_type = other RNA

SEQ ID NO: 18073 - RNA, 116 nt, synthetic construct; identical to SEQ ID NO: 17737
  source 1..116: mol_type = other RNA

SEQ ID NO: 18074 - RNA, 115 nt, synthetic construct; identical to SEQ ID NO: 17738
  source 1..115: mol_type = other RNA

SEQ ID NO: 18075 - RNA, 122 nt, synthetic construct; identical to SEQ ID NO: 17739
  source 1..122: mol_type = other RNA

SEQ ID NO: 18076 - RNA, 121 nt, synthetic construct; identical to SEQ ID NO: 17740
  source 1..121: mol_type = other RNA

SEQ ID NO: 18077 - RNA, 120 nt, synthetic construct; identical to SEQ ID NO: 17741
  source 1..120: mol_type = other RNA

SEQ ID NO: 18078 - RNA, 119 nt, synthetic construct; identical to SEQ ID NO: 17742
  source 1..119: mol_type = other RNA

SEQ ID NO: 18079 - RNA, 118 nt, synthetic construct; identical to SEQ ID NO: 17743
  source 1..118: mol_type = other RNA

SEQ ID NO: 18080 - RNA, 117 nt, synthetic construct; identical to SEQ ID NO: 17744
  source 1..117: mol_type = other RNA

SEQ ID NO: 18081 - RNA, 124 nt, synthetic construct; identical to SEQ ID NO: 17745
  source 1..124: mol_type = other RNA

SEQ ID NO: 18082 - RNA, 123 nt, synthetic construct; identical to SEQ ID NO: 17746
  source 1..123: mol_type = other RNA

SEQ ID NO: 18083 - RNA, 122 nt, synthetic construct; identical to SEQ ID NO: 17747
  source 1..122: mol_type = other RNA

SEQ ID NO: 18084 - RNA, 121 nt, synthetic construct; identical to SEQ ID NO: 17748
  source 1..121: mol_type = other RNA

SEQ ID NO: 18085 - RNA, 120 nt, synthetic construct; identical to SEQ ID NO: 17749
  source 1..120: mol_type = other RNA

SEQ ID NO: 18086 - RNA, 119 nt, synthetic construct; identical to SEQ ID NO: 17750
  source 1..119: mol_type = other RNA

SEQ ID NO: 18087 - RNA, 126 nt, synthetic construct; identical to SEQ ID NO: 17751
  source 1..126: mol_type = other RNA

SEQ ID NO: 18088 - RNA, 125 nt, synthetic construct; identical to SEQ ID NO: 17752
  source 1..125: mol_type = other RNA

SEQ ID NO: 18089 - RNA, 124 nt, synthetic construct; identical to SEQ ID NO: 17753
  source 1..124: mol_type = other RNA

SEQ ID NO: 18090 - RNA, 123 nt, synthetic construct; identical to SEQ ID NO: 17754
  source 1..123: mol_type = other RNA

SEQ ID NO: 18091 - RNA, 122 nt, synthetic construct; identical to SEQ ID NO: 17755
  source 1..122: mol_type = other RNA

SEQ ID NO: 18092 - RNA, 121 nt, synthetic construct; identical to SEQ ID NO: 17756
  source 1..121: mol_type = other RNA

SEQ ID NO: 18093 - RNA, 128 nt, synthetic construct; identical to SEQ ID NO: 17757
  source 1..128: mol_type = other RNA

SEQ ID NO: 18094 - RNA, 127 nt, synthetic construct; identical to SEQ ID NO: 17758
  source 1..127: mol_type = other RNA

SEQ ID NO: 18095 - RNA, 126 nt, synthetic construct; identical to SEQ ID NO: 17759
  source 1..126: mol_type = other RNA

SEQ ID NO: 18096 - RNA, 125 nt, synthetic construct; identical to SEQ ID NO: 17760
  source 1..125: mol_type = other RNA

SEQ ID NO: 18097 - RNA, 124 nt, synthetic construct; identical to SEQ ID NO: 17761
  source 1..124: mol_type = other RNA

SEQ ID NO: 18098 - RNA, 123 nt, synthetic construct; identical to SEQ ID NO: 17762
  source 1..123: mol_type = other RNA

SEQ ID NO: 18099 - RNA, 130 nt, synthetic construct; identical to SEQ ID NO: 17763
  source 1..130: mol_type = other RNA

SEQ ID NO: 18100 - RNA, 129 nt, synthetic construct; identical to SEQ ID NO: 17764
  source 1..129: mol_type = other RNA

SEQ ID NO: 18101 - RNA, 128 nt, synthetic construct; identical to SEQ ID NO: 17765
  source 1..128: mol_type = other RNA

SEQ ID NO: 18102 - RNA, 127 nt, synthetic construct; identical to SEQ ID NO: 17766
  source 1..127: mol_type = other RNA

SEQ ID NO: 18103 - RNA, 126 nt, synthetic construct; identical to SEQ ID NO: 17767
  source 1..126: mol_type = other RNA

SEQ ID NO: 18104 - RNA, 125 nt, synthetic construct; identical to SEQ ID NO: 17768
  source 1..125: mol_type = other RNA

SEQ ID NO: 18105 - RNA, 132 nt, synthetic construct; identical to SEQ ID NO: 17769
  source 1..132: mol_type = other RNA

SEQ ID NO: 18106 - RNA, 131 nt, synthetic construct; identical to SEQ ID NO: 17770
  source 1..131: mol_type = other RNA

SEQ ID NO: 18107 - RNA, 130 nt, synthetic construct; identical to SEQ ID NO: 17771
  source 1..130: mol_type = other RNA

SEQ ID NO: 18108 - RNA, 129 nt, synthetic construct; identical to SEQ ID NO: 17772
  source 1..129: mol_type = other RNA

SEQ ID NO: 18109 - RNA, 128 nt, synthetic construct; identical to SEQ ID NO: 17773
  source 1..128: mol_type = other RNA

SEQ ID NO: 18110 - RNA, 127 nt, synthetic construct; identical to SEQ ID NO: 17774
  source 1..127: mol_type = other RNA

SEQ ID NO: 18111 - RNA, 121 nt, synthetic construct; identical to SEQ ID NO: 17775
  source 1..121: mol_type = other RNA

SEQ ID NO: 18112 - RNA, 120 nt, synthetic construct; identical to SEQ ID NO: 17776
  source 1..120: mol_type = other RNA

SEQ ID NO: 18113 - RNA, 119 nt, synthetic construct; identical to SEQ ID NO: 17777
  source 1..119: mol_type = other RNA

SEQ ID NO: 18114 - RNA, 118 nt, synthetic construct; identical to SEQ ID NO: 17778
  source 1..118: mol_type = other RNA

SEQ ID NO: 18115 - RNA, 117 nt, synthetic construct; identical to SEQ ID NO: 17779
  source 1..117: mol_type = other RNA

SEQ ID NO: 18116 - RNA, 116 nt, synthetic construct; identical to SEQ ID NO: 17780
  source 1..116: mol_type = other RNA

SEQ ID NO: 18117 - RNA, 123 nt, synthetic construct; identical to SEQ ID NO: 17781
  source 1..123: mol_type = other RNA

SEQ ID NO: 18118 - RNA, 122 nt, synthetic construct; identical to SEQ ID NO: 17782
  source 1..122: mol_type = other RNA

SEQ ID NO: 18119 - RNA, 121 nt, synthetic construct; identical to SEQ ID NO: 17783
  source 1..121: mol_type = other RNA

SEQ ID NO: 18120 - RNA, 120 nt, synthetic construct; identical to SEQ ID NO: 17784
  source 1..120: mol_type = other RNA

SEQ ID NO: 18121 - RNA, 119 nt, synthetic construct; identical to SEQ ID NO: 17785
  source 1..119: mol_type = other RNA

SEQ ID NO: 18122 - RNA, 118 nt, synthetic construct; identical to SEQ ID NO: 17786
  source 1..118: mol_type = other RNA

SEQ ID NO: 18123 - RNA, 125 nt, synthetic construct; identical to SEQ ID NO: 17787
  source 1..125: mol_type = other RNA

SEQ ID NO: 18124 - RNA, 124 nt, synthetic construct; identical to SEQ ID NO: 17788
  source 1..124: mol_type = other RNA

SEQ ID NO: 18125 - RNA, 123 nt, synthetic construct; identical to SEQ ID NO: 17789
  source 1..123: mol_type = other RNA

SEQ ID NO: 18126 - RNA, 122 nt, synthetic construct; identical to SEQ ID NO: 17790
  source 1..122: mol_type = other RNA

SEQ ID NO: 18127 - RNA, 121 nt, synthetic construct; identical to SEQ ID NO: 17791
  source 1..121: mol_type = other RNA

SEQ ID NO: 18128 - RNA, 120 nt, synthetic construct; identical to SEQ ID NO: 17792
  source 1..120: mol_type = other RNA

SEQ ID NO: 18129 - RNA, 127 nt, synthetic construct; identical to SEQ ID NO: 17793
  source 1..127: mol_type = other RNA

SEQ ID NO: 18130 - RNA, 126 nt, synthetic construct; identical to SEQ ID NO: 17794
  source 1..126: mol_type = other RNA

SEQ ID NO: 18131 - RNA, 125 nt, synthetic construct; identical to SEQ ID NO: 17795
  source 1..125: mol_type = other RNA

SEQ ID NO: 18132 - RNA, 124 nt, synthetic construct; identical to SEQ ID NO: 17796
  source 1..124: mol_type = other RNA

SEQ ID NO: 18133 - RNA, 123 nt, synthetic construct; identical to SEQ ID NO: 17797
  source 1..123: mol_type = other RNA

SEQ ID NO: 18134 - RNA, 122 nt, synthetic construct; identical to SEQ ID NO: 17798
  source 1..122: mol_type = other RNA

SEQ ID NO: 18135 - RNA, 129 nt, synthetic construct; identical to SEQ ID NO: 17799
  source 1..129: mol_type = other RNA

SEQ ID NO: 18136 - RNA, 128 nt, synthetic construct; identical to SEQ ID NO: 17800
  source 1..128: mol_type = other RNA

SEQ ID NO: 18137 - RNA, 127 nt, synthetic construct; identical to SEQ ID NO: 17801
  source 1..127: mol_type = other RNA

SEQ ID NO: 18138 - RNA, 126 nt, synthetic construct; identical to SEQ ID NO: 17802
  source 1..126: mol_type = other RNA

SEQ ID NO: 18139 - RNA, 125 nt, synthetic construct; identical to SEQ ID NO: 17803
  source 1..125: mol_type = other RNA

SEQ ID NO: 18140 - RNA, 124 nt, synthetic construct; identical to SEQ ID NO: 17804
  source 1..124: mol_type = other RNA

SEQ ID NO: 18141 - RNA, 131 nt, synthetic construct; identical to SEQ ID NO: 17805
  source 1..131: mol_type = other RNA

SEQ ID NO: 18142 - RNA, 130 nt, synthetic construct; identical to SEQ ID NO: 17806
  source 1..130: mol_type = other RNA

SEQ ID NO: 18143 - RNA, 129 nt, synthetic construct; identical to SEQ ID NO: 17807
  source 1..129: mol_type = other RNA

SEQ ID NO: 18144 - RNA, 128 nt, synthetic construct; identical to SEQ ID NO: 17808
  source 1..128: mol_type = other RNA

SEQ ID NO: 18145 - RNA, 127 nt, synthetic construct; identical to SEQ ID NO: 17809
  source 1..127: mol_type = other RNA

SEQ ID NO: 18146 - RNA, 126 nt, synthetic construct; identical to SEQ ID NO: 17810
  source 1..126: mol_type = other RNA

SEQ ID NO: 18147 - RNA, 133 nt, synthetic construct; identical to SEQ ID NO: 17811
  source 1..133: mol_type = other RNA

SEQ ID NO: 18148 - RNA, 132 nt, synthetic construct; identical to SEQ ID NO: 17812
  source 1..132: mol_type = other RNA

SEQ ID NO: 18149 - RNA, 131 nt, synthetic construct; identical to SEQ ID NO: 17813
  source 1..131: mol_type = other RNA

SEQ ID NO: 18150 - RNA, 130 nt, synthetic construct; identical to SEQ ID NO: 17814
  source 1..130: mol_type = other RNA

SEQ ID NO: 18151 - RNA, 129 nt, synthetic construct; identical to SEQ ID NO: 17815
  source 1..129: mol_type = other RNA

SEQ ID NO: 18152 - RNA, 128 nt, synthetic construct; identical to SEQ ID NO: 17816
  source 1..128: mol_type = other RNA

SEQ ID NO: 18153 - RNA, 121 nt, synthetic construct; identical to SEQ ID NO: 17817
  source 1..121: mol_type = other RNA

SEQ ID NO: 18154 - RNA, 120 nt, synthetic construct; identical to SEQ ID NO: 17818
  source 1..120: mol_type = other RNA

SEQ ID NO: 18155 - RNA, 119 nt, synthetic construct; identical to SEQ ID NO: 17819
  source 1..119: mol_type = other RNA

SEQ ID NO: 18156 - RNA, 118 nt, synthetic construct; identical to SEQ ID NO: 17820
  source 1..118: mol_type = other RNA

SEQ ID NO: 18157 - RNA, 117 nt, synthetic construct; identical to SEQ ID NO: 17821
  source 1..117: mol_type = other RNA

SEQ ID NO: 18158 - RNA, 116 nt, synthetic construct; identical to SEQ ID NO: 17822
  source 1..116: mol_type = other RNA

SEQ ID NO: 18159 - RNA, 123 nt, synthetic construct; identical to SEQ ID NO: 17823
  source 1..123: mol_type = other RNA

SEQ ID NO: 18160 - RNA, 122 nt, synthetic construct; identical to SEQ ID NO: 17824
  source 1..122: mol_type = other RNA

SEQ ID NO: 18161 - RNA, 121 nt, synthetic construct; identical to SEQ ID NO: 17825
  source 1..121: mol_type = other RNA

SEQ ID NO: 18162 - RNA, 120 nt, synthetic construct; identical to SEQ ID NO: 17826
  source 1..120: mol_type = other RNA

SEQ ID NO: 18163 - RNA, 119 nt, synthetic construct; identical to SEQ ID NO: 17827
  source 1..119: mol_type = other RNA

SEQ ID NO: 18164 - RNA, 118 nt, synthetic construct; identical to SEQ ID NO: 17828
  source 1..118: mol_type = other RNA

SEQ ID NO: 18165 - RNA, 125 nt, synthetic construct; identical to SEQ ID NO: 17829
  source 1..125: mol_type = other RNA

SEQ ID NO: 18166 - RNA, 124 nt, synthetic construct; identical to SEQ ID NO: 17830
  source 1..124: mol_type = other RNA

SEQ ID NO: 18167 - RNA, 123 nt, synthetic construct; identical to SEQ ID NO: 17831
  source 1..123: mol_type = other RNA

SEQ ID NO: 18168 - RNA, 122 nt, synthetic construct; identical to SEQ ID NO: 17832
  source 1..122: mol_type = other RNA

SEQ ID NO: 18169 - RNA, 121 nt, synthetic construct; identical to SEQ ID NO: 17833
  source 1..121: mol_type = other RNA

SEQ ID NO: 18170 - RNA, 120 nt, synthetic construct; identical to SEQ ID NO: 17834
  source 1..120: mol_type = other RNA

SEQ ID NO: 18171 - RNA, 127 nt, synthetic construct; identical to SEQ ID NO: 17835
  source 1..127: mol_type = other RNA

SEQ ID NO: 18172 - RNA, 126 nt, synthetic construct; identical to SEQ ID NO: 17836
  source 1..126: mol_type = other RNA

SEQ ID NO: 18173 - RNA, 125 nt, synthetic construct; identical to SEQ ID NO: 17837
  source 1..125: mol_type = other RNA

SEQ ID NO: 18174 - RNA, 124 nt, synthetic construct; identical to SEQ ID NO: 17838
  source 1..124: mol_type = other RNA

SEQ ID NO: 18175 - RNA, 123 nt, synthetic construct; identical to SEQ ID NO: 17839
  source 1..123: mol_type = other RNA

SEQ ID NO: 18176 - RNA, 122 nt, synthetic construct; identical to SEQ ID NO: 17840
  source 1..122: mol_type = other RNA

SEQ ID NO: 18177 - RNA, 129 nt, synthetic construct; identical to SEQ ID NO: 17841
  source 1..129: mol_type = other RNA

SEQ ID NO: 18178 - RNA, 128 nt, synthetic construct; identical to SEQ ID NO: 17842
  source 1..128: mol_type = other RNA

SEQ ID NO: 18179 - RNA, 127 nt, synthetic construct; identical to SEQ ID NO: 17843
  source 1..127: mol_type = other RNA

SEQ ID NO: 18180 - RNA, 126 nt, synthetic construct; identical to SEQ ID NO: 17844
  source 1..126: mol_type = other RNA

SEQ ID NO: 18181 - RNA, 125 nt, synthetic construct; identical to SEQ ID NO: 17845
  source 1..125: mol_type = other RNA

SEQ ID NO: 18182 - RNA, 124 nt, synthetic construct; identical to SEQ ID NO: 17846
  source 1..124: mol_type = other RNA

SEQ ID NO: 18183 - RNA, 131 nt, synthetic construct; identical to SEQ ID NO: 17847
  source 1..131: mol_type = other RNA

SEQ ID NO: 18184 - RNA, 130 nt, synthetic construct; identical to SEQ ID NO: 17848
  source 1..130: mol_type = other RNA

SEQ ID NO: 18185 - RNA, 129 nt, synthetic construct; identical to SEQ ID NO: 17849
  source 1..129: mol_type = other RNA

SEQ ID NO: 18186 - RNA, 128 nt, synthetic construct; identical to SEQ ID NO: 17850
  source 1..128: mol_type = other RNA

SEQ ID NO: 18187 - RNA, 127 nt, synthetic construct; identical to SEQ ID NO: 17851
  source 1..127: mol_type = other RNA

SEQ ID NO: 18188 - RNA, 126 nt, synthetic construct; identical to SEQ ID NO: 17852
  source 1..126: mol_type = other RNA

SEQ ID NO: 18189 - RNA, 133 nt, synthetic construct; identical to SEQ ID NO: 17853
  source 1..133: mol_type = other RNA

SEQ ID NO: 18190 - RNA, 132 nt, synthetic construct; identical to SEQ ID NO: 17854
  source 1..132: mol_type = other RNA

SEQ ID NO: 18191 - RNA, 131 nt, synthetic construct; identical to SEQ ID NO: 17855
  source 1..131: mol_type = other RNA

SEQ ID NO: 18192 - RNA, 130 nt, synthetic construct; identical to SEQ ID NO: 17856
  source 1..130: mol_type = other RNA

SEQ ID NO: 18193 - RNA, 129 nt, synthetic construct; identical to SEQ ID NO: 17857
  source 1..129: mol_type = other RNA

SEQ ID NO: 18194 - RNA, 128 nt, synthetic construct; identical to SEQ ID NO: 17858
  source 1..128: mol_type = other RNA

SEQ ID NO: 18195 - RNA, 20 nt, synthetic construct
  source 1..20: mol_type = other RNA
actcacgctggatagcctcc

SEQ ID NO: 18196 - RNA, 20 nt, synthetic construct
  source 1..20: mol_type = other RNA
gagtagcgcgagcacagcta

SEQ ID NO: 18197 - RNA, 50 nt, synthetic construct
  source 1..50: mol_type = other RNA
cgctccgtggccttagctgtgctcgcgctactctctctttctggcctgga

SEQ ID NO: 18198 - RNA, 50 nt, synthetic construct
  source 1..50: mol_type = other RNA
tcctgaagctgacagcattcgggccgagatgtctcgctccgtggccttag

SEQ ID NO: 18199 - RNA, 17 nt, synthetic construct
  source 1..17: mol_type = other RNA
ggctatccagcgtgagt

SEQ ID NO: 18200 - RNA, 17 nt, synthetic construct
  source 1..17: mol_type = other RNA
ctgtgctcgcgctactc

SEQ ID NO: 18201 - RNA, 123 nt, synthetic construct; identical to SEQ ID NO: 15004
  source 1..123: mol_type = other RNA
  modified_base 1: mod_base = OTHER; note = 2'-O-methyl modified nucleotide with phosphorothioate linkage
  modified_base 2: mod_base = OTHER; note = 2'-O-methyl modified nucleotide with phosphorothioate linkage
  modified_base 3: mod_base = OTHER; note = 2'-O-methyl modified nucleotide with phosphorothioate linkage
  modified_base 29: mod_base = OTHER; note = 2'-O-methyl modified nucleotide
  modified_base 30: mod_base = OTHER; note = 2'-O-methyl modified nucleotide
  modified_base 31: mod_base = OTHER; note = 2'-O-methyl modified nucleotide
  modified_base 32: mod_base = OTHER; note = 2'-O-methyl modified nucleotide
  modified_base 33: mod_base = OTHER; note = 2'-O-methyl modified nucleotide
  modified_base 34: mod_base = OTHER; note = 2'-O-methyl modified nucleotide
  modified_base 35: mod_base = OTHER; note = 2'-O-methyl modified nucleotide
  modified_base 36: mod_base = OTHER; note = 2'-O-methyl modified nucleotide
  modified_base 37: mod_base = OTHER; note = 2'-O-methyl modified nucleotide
  modified_base 38: mod_base = OTHER; note = 2'-O-methyl modified nucleotide
  modified_base 39: mod_base = OTHER; note = 2'-O-methyl modified nucleotide
  modified_base 40: mod_base = OTHER; note = 2'-O-methyl modified nucleotide
  modified_base 69: mod_base = OTHER; note = 2'-O-methyl modified nucleotide
  modified_base 70: mod_base = OTHER; note = 2'-O-methyl modified nucleotide
  modified_base 71: mod_base = OTHER; note = 2'-O-methyl modified nucleotide
  modified_base 72: mod_base = OTHER; note = 2'-O-methyl modified nucleotide
  modified_base 73: mod_base = OTHER; note = 2'-O-methyl modified nucleotide
  modified_base 74: mod_base = OTHER; note = 2'-O-methyl modified nucleotide
  modified_base 75: mod_base = OTHER; note = 2'-O-methyl modified nucleotide
  modified_base 76: mod_base = OTHER; note = 2'-O-methyl modified nucleotide
  modified_base 77: mod_base = OTHER; note = 2'-O-methyl modified nucleotide
  modified_base 78: mod_base = OTHER; note = 2'-O-methyl modified nucleotide
  modified_base 79: mod_base = OTHER; note = 2'-O-methyl modified nucleotide
  modified_base 80: mod_base = OTHER; note = 2'-O-methyl modified nucleotide
  modified_base 81: mod_base = OTHER; note = 2'-O-methyl modified nucleotide
  modified_base 82: mod_base = OTHER; note = 2'-O-methyl modified nucleotide
  modified_base 83: mod_base = OTHER; note = 2'-O-methyl modified nucleotide
  modified_base 84: mod_base = OTHER; note = 2'-O-methyl modified nucleotide
  modified_base 85: mod_base = OTHER; note = 2'-O-methyl modified nucleotide
  modified_base 86: mod_base = OTHER; note = 2'-O-methyl modified nucleotide
  modified_base 87: mod_base = OTHER; note = 2'-O-methyl modified nucleotide
  modified_base 88: mod_base = OTHER; note = 2'-O-methyl modified nucleotide
  modified_base 89: mod_base = OTHER; note = 2'-O-methyl modified nucleotide
  modified_base 90: mod_base = OTHER; note = 2'-O-methyl modified nucleotide
  modified_base 91: mod_base = OTHER; note = 2'-O-methyl modified nucleotide
  modified_base 92: mod_base = OTHER; note = 2'-O-methyl modified nucleotide
  modified_base 93: mod_base = OTHER; note = 2'-O-methyl modified nucleotide
  modified_base 94: mod_base = OTHER; note = 2'-O-methyl modified nucleotide
  modified_base 95: mod_base = OTHER; note = 2'-O-methyl modified nucleotide
  modified_base 96: mod_base = OTHER; note = 2'-O-methyl modified nucleotide
  modified_base 120: mod_base = OTHER; note = Nucleotide with phosphorothioate linkage
  modified_base 121: mod_base = OTHER; note = 2'-O-methyl modified nucleotide with phosphorothioate linkage
  modified_base 122: mod_base = OTHER; note = 2'-O-methyl modified nucleotide with phosphorothioate linkage
  modified_base 123: mod_base = OTHER; note = 2'-O-methyl modified nucleotide

SEQ ID NO: 18202 - RNA, 125 nt, synthetic construct; identical to SEQ ID NO: 15005
  source 1..125: mol_type = other RNA
  modified_base 1: mod_base = OTHER; note = 2'-O-methyl modified nucleotide with phosphorothioate linkage
  modified_base 2: mod_base = OTHER; note = 2'-O-methyl modified nucleotide with phosphorothioate linkage
  modified_base 3: mod_base = OTHER; note = 2'-O-methyl modified nucleotide with phosphorothioate linkage
  modified_base 29: mod_base = OTHER; note = 2'-O-methyl modified nucleotide
  modified_base 30: mod_base = OTHER; note = 2'-O-methyl modified nucleotide
  modified_base 31: mod_base = OTHER; note = 2'-O-methyl modified nucleotide
  modified_base 32: mod_base = OTHER; note = 2'-O-methyl modified nucleotide
  modified_base 33: mod_base = OTHER; note = 2'-O-methyl modified nucleotide
  modified_base 34: mod_base = OTHER; note = 2'-O-methyl modified nucleotide
  modified_base 35: mod_base = OTHER; note = 2'-O-methyl modified nucleotide
  modified_base 36: mod_base = OTHER; note = 2'-O-methyl modified nucleotide
  modified_base 37: mod_base = OTHER; note = 2'-O-methyl modified nucleotide
  modified_base 38: mod_base = OTHER; note = 2'-O-methyl modified nucleotide
  modified_base 39: mod_base = OTHER; note = 2'-O-methyl modified nucleotide
  modified_base 40: mod_base = OTHER; note = 2'-O-methyl modified nucleotide
  modified_base 69: mod_base = OTHER; note = 2'-O-methyl modified nucleotide
  modified_base 70: mod_base = OTHER; note = 2'-O-methyl modified nucleotide
  modified_base 71: mod_base = OTHER; note = 2'-O-methyl modified nucleotide
  modified_base 72: mod_base = OTHER; note = 2'-O-methyl modified nucleotide
  modified_base 73: mod_base = OTHER; note = 2'-O-methyl modified nucleotide
  modified_base 74: mod_base = OTHER; note = 2'-O-methyl modified nucleotide
  modified_base 75: mod_base = OTHER; note = 2'-O-methyl modified nucleotide
  modified_base 76: mod_base = OTHER; note = 2'-O-methyl modified nucleotide
  modified_base 77: mod_base = OTHER; note = 2'-O-methyl modified nucleotide
  modified_base 78: mod_base = OTHER; note = 2'-O-methyl modified nucleotide
  modified_base 79: mod_base = OTHER; note = 2'-O-methyl modified nucleotide
  modified_base 80: mod_base = OTHER; note = 2'-O-methyl modified nucleotide
  modified_base 81: mod_base = OTHER; note = 2'-O-methyl modified nucleotide
  modified_base 82: mod_base = OTHER; note = 2'-O-methyl modified nucleotide
  modified_base 83: mod_base = OTHER; note = 2'-O-methyl modified nucleotide
  modified_base 84: mod_base = OTHER; note = 2'-O-methyl modified nucleotide
  modified_base 85: mod_base = OTHER; note = 2'-O-methyl modified nucleotide
  modified_base 86: mod_base = OTHER; note = 2'-O-methyl modified nucleotide
  modified_base 87: mod_base = OTHER; note = 2'-O-methyl modified nucleotide
  modified_base 88: mod_base = OTHER; note = 2'-O-methyl modified nucleotide
  modified_base 89: mod_base = OTHER; note = 2'-O-methyl modified nucleotide
  modified_base 90: mod_base = OTHER; note = 2'-O-methyl modified nucleotide
  modified_base 91: mod_base = OTHER; note = 2'-O-methyl modified nucleotide
  modified_base 92: mod_base = OTHER; note = 2'-O-methyl modified nucleotide
  modified_base 93: mod_base = OTHER; note = 2'-O-methyl modified nucleotide
  modified_base 94: mod_base = OTHER; note = 2'-O-methyl modified nucleotide
  modified_base 95: mod_base = OTHER; note = 2'-O-methyl modified nucleotide
  modified_base 96: mod_base = OTHER; note = 2'-O-methyl modified nucleotide
  modified_base 122: mod_base = OTHER; note = Nucleotide with phosphorothioate linkage
  modified_base 123: mod_base = OTHER; note = 2'-O-methyl modified nucleotide with phosphorothioate linkage
  modified_base 124: mod_base = OTHER; note = 2'-O-methyl modified nucleotide with phosphorothioate linkage
  modified_base 125: mod_base = OTHER; note = 2'-O-methyl modified nucleotide

SEQ ID NO: 18203 - RNA, 123 nt, synthetic construct; identical to SEQ ID NO: 15004
  source 1..123: mol_type = other RNA

SEQ ID NO: 18204 - RNA, 125 nt, synthetic construct; identical to SEQ ID NO: 15005
  source 1..125: mol_type = other RNA

SEQ ID NO: 18205 - RNA, 3672 nt, synthetic construct
  source 1..3672: mol_type = other RNA
aggaaataagagagaaaagaagagtaagaagaaatataagagccaccatgccaaagaagaaaagaaaagtaggaggttccgactccacagctcatcccaaccagggacgtggcctggagaaggtgtcccagactctgcctgcgctgcagaccccagggcagcacactgccgctgggggatcctctcccctgtccggcaggaatcagcggaagaacaccaaaaagctgttgctgggcgcctggaacatccgcaccctgctcgaccgcgaaaatactccccgtcctgaaagacgcacggcactgattgggaaagagctcgccagatataacatcgacatcgctgccctgtccgaaacccgcctgccagaggaaggatctctgagcgagcctaccactggctacacgttcttttggaagggcagagcaagcaacgaggaccgtatccatggtgtaggcctggctatcaagacctctctcctgaaacaactcccagatctgccagtcggcatctcagagagactgatgaagatcaggcttcctctctcaaaagaccgctacgcaaccatcatttccgcatacgcgccgaccctgactagcaccgaggaaaccattgagcagttctactctgatctttcagctgttttgcactccgtgcctaccaacgacaagctgatcctcctgggcgacttcaacgctcgcgtgggtcaggaccatgagcgctggaaaggcgtgctgggtaagcatggcgtgggtaagatgaacaataacggcctcctgctcctgtctaagtgtagcgaattcgagctgactattaccaacactgtttttcgtatggctaacaagtacaaaactacatggatgcaccccaggagcaagcagtggcacctgattgactacattatcgtgcgtaggcgggatatccaggacgtgaagattacccgtgcaatgcgcggcgctgagtgctggacagaccatcgcctggtgagagctactctccagatgaggatcgcaccgcgtcaccctaagcgcgcccagaccgtgcgggccttttacaacgtatcacggcttcgggatccttcctaccttcagacatttcaatcttgcctcgatgacaagctctctgctaagggtcccctcaccggatcttcaacagagaagtggaaccaattccgcgatgcggtgaaggaaaccagcaaagcagtcctgggaccgaagcagcgcaaccaccaagactggtttgacgaaaataacactgccatcgaagacctcctgtctaaaaagaacaaagcatttatggagtggcagaataacccaaacagtgcacccaagaaagaccgtttcaaaagcctgcaggccaccgcgcagcgcgagatccggaagatgcaggaccgctggtgggaaaaaaaggccgaagagatccagaggttcgcggatatgaaaaactacaagcagttctttagcgcactgaagaccgtgtacggacctctcaaacccaccacgactcccctgctctcttccgatggtgacactctcatcaaggacaaaaagggaatcagcaaccgctggaaagaacacttttctcaacttctcaaccgcccaagctccgtggaccagagcgctctggaccagatcccgcagaaccgtaccatcgagcagctggacgtgcctccctccatcgaagaggtccagaaggctatcaagcagatgtctgctgggaaggctcctggcaaggatgggatcccaacagaggtctataaagctctcaacggaaaggcgctgcaggcctttcacattgtcctgacctccatctgggaggaagaggacatgccacctgaacttagggacgcctctattgtggccctgtacaagaataagggcagccgcgcagcttgtgataactatcgtggcatctcactcctgagtacagctggcaagattctggctcgtgtgatcctgaaccggttgctgagttccgtttccgagcagaacctgcccgaatcacagtgcggcttccgccccgatcggtccaccatcgatatggtgttcaccgtgcgtcagatgcaggagaagtgcctggaacagaatctgagcctgtacatcgttttcatcgatctgactaaggccttcgacacggtgaaccgcgatgccctgtgggtgatcctgagcaagctggggtgccccgctaagttcgtaaagctcatccagttgttccacgttgatatgacgggagaggtcctgtccggtggagaaacctccgaccggtttaacatctccaatggcgtgaaacagggctgcgtcctggccccagtgctgttcaacctgtttttcacacaggtgctgagacatgcggttatggatcttgacctgggtgtgtatatcaagtatcgcttggacggcagtctgttcgatctcagacgcctgacagctaagactaagactaccgagcgcctcattctcgaagccctgtttgccgacgattgtgcccttatggcccaccaggagaaccacctgcagacgattgtcgaccgcttctctacagcgaccaagctgttcggcctcaccatctccctctcaaagaccgaagtcctgtttcagcccgcacccgggagacccacgaatcagccgtgcattaccattgacgggacccaactttccaacgtcaacaccttcaagtatctgggatctaccatcgccaatgatggcagcctggatcatgaaatcaacgcaaggatccaaaaggctagccaggcactgggccgcctccggtgcaaggtcctgcagcaccggggcgtttccactgccactaaactgaaggtgtacaacgctgtcgtgctctcttccctgctttatggctgcgaaacatggactctgtaccggaagcatatgaaacagcttgagcagttccaccagaggagcttgcgtagcatcatgaggatccgctggcaggaccgcatcaccaaccaggaggtgctggacagggctaattccaccagcatcgaagttatggtgctgaagacccagctccgttggtctggccatgtcattcggatggaccctcagcgtatcccccgccaggtattctacggggaactgtctgcggggctcagaaagcagggccgcccaaagaaacgctttaaggatcagctgaaaagcaatctgaagtgggccggcatcacccccaagcagctggagctggcggcatctgaccgctccagctggcgcacccacattaaccacgcagctactacctttgaggacgaacgccggcgcagactggccgctgcacgcgagaggcgccaccaagccactaccgcccctcccgtgaccactggggtcccttgccctatgtgccacaagctgtgtgcgtctgccttcggtttgcagtcccacatgcgtgtgcatcgccgcagcggcagcgagactcccgggacctcagagtccgccacacccgaaagtgtgagcggctggcggctgttcaagaagattagctgagctggagcctcggtggccatgcttcttgccccttgggcctccccccagcccctcctccccttcctgcacccgtacccccgtggtctttgaataaagtctgaaaaaaaaaaaaaaaaaaaaaaaaaaaaaaaaaaaaaaaaaaaaaaaaaaaaaaaaaaaaaaaaaaaaaaaaaaaaaaaaa

SEQ ID NO: 18206 - protein, 1147 aa, synthetic construct
MPKKKRKVGGSDSTAHPNQGRGLEKVSQTLPALQTPGQHTAAGGSSPLSGRNQRKNTKKLLLGAWNIRTLLDRENTPRPERRTALIGKELARYNIDIAALSETRLPEEGSLSEPTTGYTFFWKGRASNEDRIHGVGLAIKTSLLKQLPDLPVGISERLMKIRLPLSKDRYATIISAYAPTLTSTEETIEQFYSDLSAVLHSVPTNDKLILLGDFNARVGQDHERWKGVLGKHGVGKMNNNGLLLLSKCSEFELTITNTVFRMANKYKTTWMHPRSKQWHLIDYIIVRRRDIQDVKITRAMRGAECWTDHRLVRATLQMRIAPRHPKRAQTVRAFYNVSRLRDPSYLQTFQSCLDDKLSAKGPLTGSSTEKWNQFRDAVKETSKAVLGPKQRNHQDWFDENNTAIEDLLSKKNKAFMEWQNNPNSAPKKDRFKSLQATAQREIRKMQDRWWEKKAEEIQRFADMKNYKQFFSALKTVYGPLKPTTTPLLSSDGDTLIKDKKGISNRWKEHFSQLLNRPSSVDQSALDQIPQNRTIEQLDVPPSIEEVQKAIKQMSAGKAPGKDGIPTEVYKALNGKALQAFHIVLTSIWEEEDMPPELRDASIVALYKNKGSRAACDNYRGISLLSTAGKILARVILNRLLSSVSEQNLPESQCGFRPDRSTIDMVFTVRQMQEKCLEQNLSLYIVFIDLTKAFDTVNRDALWVILSKLGCPAKFVKLIQLFHVDMTGEVLSGGETSDRFNISNGVKQGCVLAPVLFNLFFTQVLRHAVMDLDLGVYIKYRLDGSLFDLRRLTAKTKTTERLILEALFADDCALMAHQENHLQTIVDRFSTATKLFGLTISLSKTEVLFQPAPGRPTNQPCITIDGTQLSNVNTFKYLGSTIANDGSLDHEINARIQKASQALGRLRCKVLQHRGVSTATKLKVYNAVVLSSLLYGCETWTLYRKHMKQLEQFHQRSLRSIMRIRWQDRITNQEVLDRANSTSIEVMVLKTQLRWSGHVIRMDPQRIPRQVFYGELSAGLRKQGRPKKRFKDQLKSNLKWAGITPKQLELAASDRSSWRTHINHAATTFEDERRRRLAAARERRHQATTAPPVTTGVPCPMCHKLCASAFGLQSHMRVHRRSGSETPGTSESATPESVSGWRLFKKIS

SEQ ID NO: 18207 - RNA, 51 nt, synthetic construct
  source 1..51: mol_type = other RNA
tgaaactgcacaaagacaatagtcattctcgatcaccgagagactaccact

SEQ ID NO: 18208 - RNA, 3096 nt, synthetic construct
  source 1..3096: mol_type = other RNA
aggggtgtatggggtgctcagggaggggtagtatctctggtatggagggcttgtcgtgccctcctagggcagctctccagcctctgacccccacctgacacccagctctcacttgtggctcccagtagctgctagcatgtggcagcggccacaccccgggcaacggcttcgacaggccggctaaaccttgtgagggtagccatcgggtcatcgacccctggtgaaccagggctttgctcacccagcatgtgaagactgcttcggctgaacagacggaagaaaccaataagaaggttcaacggctgagagggcgacgcagcaaagcactgtggagtgcttagggcgtgttggagcacaaaggacaacacggccatccaatgcagctgaggaagtctccagatgtaacaatttttcgtgccactggacccaggcttccaacgccgagagagtgggactgtctctgtgcatcggcttttccacttaaatctctttcacgcacaagtatctttgtgcacactcatctatcctaaccccgtccaccctcttcaagacctgcggcgatgggggagtggcgacgcaacaggtggaggtgaccactggcagttgtagtcacgatcctgcacgtaggcggcccacggaccagtggtcgctcggccctgtgggcagcagggacgttcggcagcatcctgggcgactgagcagccctctctaggtttacggatccgaattctcgacggatcgatccgttctttccgcctcagaagccatagagcccaccgcatccccagcatgcctgctattgtcttcccaatcctcccccttgctgtcctgccccaccccaccccccagaatagaatgacacctactcagacaatgcgatgcaatttcctcattttattaggaaaggacagtgggagtggcaccttccagggtcaaggaaggcacgggggaggggcaaacaacagatggctggcaactagaaggcacagtcgaggctgatcagcgaatcccccggccgctttatctggggggcagggcctgcatgtgcagggcgtcgtaggtgtccttggtggcggtgctcaggccctggtacaggccatcgtggcccttgccgcgcctccgctcgcccttcatgccgatctcgctgtaggcctcggccatcttgtctttctgcagttcgttatacaggccttcctgggggttcttccgtctgggctttccgcccatctcggggtcccggcctctccgcttgtccagcacgtcgtactcttcccgtctgcccaggttcagctcgttgtacagctggttctgtccctgctggtaggcaggggcgtcggcggatctgctgaacttcactctcagttcacatcctccttcttcttcttctggaaatcggcagctacagccatcttcctcttgagtagtttgtactggtctcataaatggttgtttgaatatatacaggagtttctttctgccccgtttgttccggtggttgcagtacagggtgatcaccaggctcagcagcagcacgccacaggtgccggccagaggggcccagatgtagatgtcgcaggcgaagtccaggcctctggtgtgcacggctccgccggcagcaggtctacaggcttcgggccgcagagacagaggctggctggcgattgttggggctggggtgggaggtctaggggcaggggtggtggtaggtttggcgggcaggaacacgggcacgaatgagctgacggtgaccattgtaccctgaccccatacgtctagtatggtgtctccacgatctctggcgcagtagtacaccgccgtgtctgcggcggtcacagaactcagcttcagggagaactggttcttggacgtgtctacggatatggtgactcgactcttgagggacgggttgtagtaggtgctcccactataggagatactcccaatccactccagccccttccctgggggctggcggatccagccccagtagtaactactactgctgatggagccaccagagacagtacaggtgagggacagggtctccgaaggcttcaccagtcctgggcccgactcctgcagctgcagctgtccctttgtgctgccctcgccagagccaggcttgccggagccgctggtgctgcctttgatctcaaccttggtccctccgccaaaagtgaggaggtcgtatttttgctgacagtagtaagttgcaaaatcttcaggttgcagactgctgatggtgagagtgaaatctgtcccagatccactgccactgaaccttgatgggaccccactttgcaaactggatgcagcatagatcaggagcttaggggctttccctggtttctgctgataccaatttaaatagctgctaatgctctgacttgcccggcaagtgatggtgactctgtctcctacagatgcagacagggaggatggagactgggtcatctggatgtccgggcgagcggcatgcaagagcagggcaagaggcagaagcagggcggtcaccggcagagccatggtggctttaccaacagtaccggaatgccaagcttgggtctgggctcttttattgagctcggggagcagaagcgcgcgaacagaagcgagaagcgaactgattggttagttcaaataaggcacagggtcatttcaggtccttggggcaccctggaaacatctgatggttctctagaaactgctgagggcgggaccgcatctggggaccatctgttcttggccctgagccggggcaggaactgcttaccacagatatcctgtttggcccatattctgctgttccaactgttcttggccctgagccggggcaggaactgcttaccacagatatcctgtttggcccatattctgctgtctctctgttcctaaccttgatcctagcttgccaaacctacaggtggggtctttcattcccccctttttctggagactaaataaatgaaactgcacaaagacaatagtcattctcgatcaccgagagactaccactaaaaaaaaaaaaaaaaaaaaaaaaaaaaaaaaaaaaaaaaaaaaaaaaaaaaaaaaaaaaaaaaaaaaaaaaaaaaaaaa

SEQ ID NO: 18209 - protein, 480 aa, synthetic construct
DIQMTQSPSSLSASVGDRVTITCRASQSISSYLNWYQQKPGKAPKLLIYAASSLQSGVPSRFSGSGSGTDFTLTISSLQPEDFATYYCQQKYDLLTFGGGTKVEIKGSTSGSGKPGSGEGSTKGQLQLQESGPGLVKPSETLSLTCTVSGGSISSSSYYWGWIRQPPGKGLEWIGSISYSGSTYYNPSLKSRVTISVDTSKNQFSLKLSSVTAADTAVYYCARDRGDTILDVWGQGTMVTVSSFVPVFLPAKPTTTPAPRPPTPAPTIASQPLSLRPEACRPAAGGAVHTRGLDFACDIYIWAPLAGTCGVLLLSLVITLYCNHRNKRGRKKLLYIFKQPFMRPVQTTQEEDGCSCRFPEEEEGGCELRVKFSRSADAPAYQQGQNQLYNELNLGRREEYDVLDKRRGRDPEMGGKPRRKNPQEGLYNELQKDKMAEAYSEIGMKGERRRGKGHDGLYQGLSTATKDTYDALHMQALPPR

SEQ ID NO: 18210 - protein, 55 aa, synthetic construct
FVPVFLPAKPTTTPAPRPPTPAPTIASQPLSLRPEACRPAAGGAVHTRGLDFACD

SEQ ID NO: 18211 - protein, 28 aa, synthetic construct
IYIWAPLAGTCGVLLLSLVITLYCNHRN

SEQ ID NO: 18212 - protein, 42 aa, synthetic construct
KRGRKKLLYIFKQPFMRPVQTTQEEDGCSCRFPEEEEGGCEL

SEQ ID NO: 18213 - protein, 18 aa, synthetic construct
EGRGSLLTCGDVEENPGP

SEQ ID NO: 18214 - protein, 239 aa, synthetic construct
MVSKGEELFTGVVPILVELDGDVNGHKFSVSGEGEGDATYGKLTLKFICTTGKLPVPWPTLVTTLTYGVQCFSRYPDHMKQHDFFKSAMPEGYVQERTIFFKDDGNYKTRAEVKFEGDTLVNRIELKGIDFKEDGNILGHKLEYNYNSHNVYIMADKQKNGIKVNFKIRHNIEDGSVQLADHYQQNTPIGDGPVLLPDNHYLSTQSALSKDPNEKRDHMVLLEFVTAAGITLGMDELYK

SEQ ID NO: 18215 - protein, 2133 aa, synthetic construct
MPAAKRVKLDGGDKKYSIGLDIGTNSVGWAVITDEYKVPSKKFKVLGNTDRHSIKKNLIGALLFDSGETAEATRLKRTARRRYTRRKNRICYLQEIFSNEMAKVDDSFFHRLEESFLVEEDKKHERHPIFGNIVDEVAYHEKYPTIYHLRKKLVDSTDKADLRLIYLALAHMIKFRGHFLIEGDLNPDNSDVDKLFIQLVQTYNQLFEENPINASGVDAKAILSARLSKSRRLENLIAQLPGEKKNGLFGNLIALSLGLTPNFKSNFDLAEDAKLQLSKDTYDDDLDNLLAQIGDQYADLFLAAKNLSDAILLSDILRVNTEITKAPLSASMIKRYDEHHQDLTLLKALVRQQLPEKYKEIFFDQSKNGYAGYIDGGASQEEFYKFIKPILEKMDGTEELLVKLNREDLLRKQRTFDNGSIPHQIHLGELHAILRRQEDFYPFLKDNREKIEKILTFRIPYYVGPLARGNSRFAWMTRKSEETITPWNFEEVVDKGASAQSFIERMTNFDKNLPNEKVLPKHSLLYEYFTVYNELTKVKYVTEGMRKPAFLSGEQKKAIVDLLFKTNRKVTVKQLKEDYFKKIECFDSVEISGVEDRFNASLGTYHDLLKIIKDKDFLDNEENEDILEDIVLTLTLFEDREMIEERLKTYAHLFDDKVMKQLKRRRYTGWGRLSRKLINGIRDKQSGKTILDFLKSDGFANRNFMQLIHDDSLTFKEDIQKAQVSGQGDSLHEHIANLAGSPAIKKGILQTVKVVDELVKVMGRHKPENIVIEMARENQTTQKGQKNSRERMKRIEEGIKELGSQILKEHPVENTQLQNEKLYLYYLQNGRDMYVDQELDINRLSDYDVDHIVPQSFLKDDSIDNKVLTRSDKNRGKSDNVPSEEVVKKMKNYWRQLLNAKLITQRKFDNLTKAERGGLSELDKAGFIKRQLVETRQITKHVAQILDSRMNTKYDENDKLIREVKVITLKSKLVSDFRKDFQFYKVREINNYHHAHDAYLNAVVGTALIKKYPKLESEFVYGDYKVYDVRKMIAKSEQEIGKATAKYFFYSNIMNFFKTEITLANGEIRKRPLIETNGETGEIVWDKGRDFATVRKVLSMPQVNIVKKTEVQTGGFSKESILPKRNSDKLIARKKDWDPKKYGGFDSPTVAYSVLVVAKVEKGKSKKLKSVKELLGITIMERSSFEKNPIDFLEAKGYKEVKKDLIIKLPKYSLFELENGRKRMLASAGELQKGNELALPSKYVNFLYLASHYEKLKGSPEDNEQKQLFVEQHKHYLDEIIEQISEFSKRVILADANLDKVLSAYNKHRDKPIREQAENIIHLFTLTNLGAPAAFKYFDTTIDRKRYTSTKEVLDATLIHQSITGLYETRIDLSQLGGDGGAEAAAKEAAAKEAAAKEAAAKALEAEAAAKEAAAKEAAAKEAAAKAGGTAPLEEEYRLFLEAPIQNVTLLEQWKREIPKVWAEINPPGLASTQAPIHVQLLSTALPVRVRQYPITLEAKRSLRETIRKFRAAGILRPVHSPWNTPLLPVRKSGTSEYRMVQDLREVNKRVETIHPTVPNPYTLLSLLPPDRIWYSVLDLKDAFFCIPLAPESQLIFAFEWADAEEGESGQLTWTRLPQGFKNSPTLFNEALNRDLQGFRLDHPSVSLLQYVDDLLIAADTQAACLSATRDLLMTLAELGYRVSGKKAQLCQEEVTYLGFKIHKGSRSLSNSRTQAILQIPVPKTKRQVREFLGKIGYCRLFIPGFAELAQPLYAATRPGNDPLVWGEKEEEAFQSLKLALTQPPALALPSLDKPFQLFVEETSGAAKGVLTQALGPWKRPVAYLSKRLDPVAAGWPRCLRAIAAAALLTREASKLTFGQDIEITSSHNLESLLRSPPDKWLTNARITQYQVLLLDPPRVRFKQTAALNPATLLPETDDTLPIHHCLDTLDSLTSTRPDLTDQPLAQAEATLFTDGSSYIRDGKRYAGAAVVTLDSVIWAEPLPIGTSAQKAELIALTKALEWSKDKSVNIYTDSRYAFATLHVHGMIYRERGWLTAGGKAIKNAPEILALLTAVWLPKRVAVMHCKGHQKDDAPTSTGNRRADEVAREVAIRPLSTQATISAGKRTADGSEFEKRTADGSEFESPKKKAKVE

SEQ ID NO: 18216 - RNA, 100 nt, synthetic construct
  source 1..100: mol_type = other RNA
  modified_base 1: mod_base = OTHER; note = 2'-O-methyl modified nucleotide with phosphorothioate linkage
  modified_base 2: mod_base = OTHER; note = 2'-O-methyl modified nucleotide with phosphorothioate linkage
  modified_base 3: mod_base = OTHER; note = 2'-O-methyl modified nucleotide with phosphorothioate linkage
  modified_base 29: mod_base = OTHER; note = 2'-O-methyl modified nucleotide
  modified_base 30: mod_base = OTHER; note = 2'-O-methyl modified nucleotide
  modified_base 31: mod_base = OTHER; note = 2'-O-methyl modified nucleotide
  modified_base 32: mod_base = OTHER; note = 2'-O-methyl modified nucleotide
  modified_base 33: mod_base = OTHER; note = 2'-O-methyl modified nucleotide
  modified_base 34: mod_base = OTHER; note = 2'-O-methyl modified nucleotide
  modified_base 35: mod_base = OTHER; note = 2'-O-methyl modified nucleotide
  modified_base 36: mod_base = OTHER; note = 2'-O-methyl modified nucleotide
  modified_base 37: mod_base = OTHER; note = 2'-O-methyl modified nucleotide
  modified_base 38: mod_base = OTHER; note = 2'-O-methyl modified nucleotide
  modified_base 39: mod_base = OTHER; note = 2'-O-methyl modified nucleotide
  modified_base 40: mod_base = OTHER; note = 2'-O-methyl modified nucleotide
  modified_base 69: mod_base = OTHER; note = 2'-O-methyl modified nucleotide
  modified_base 70: mod_base = OTHER; note = 2'-O-methyl modified nucleotide
  modified_base 71: mod_base = OTHER; note = 2'-O-methyl modified nucleotide
  modified_base 72: mod_base = OTHER; note = 2'-O-methyl modified nucleotide
  modified_base 73: mod_base = OTHER; note = 2'-O-methyl modified nucleotide
  modified_base 74: mod_base = OTHER; note = 2'-O-methyl modified nucleotide
  modified_base 75: mod_base = OTHER; note = 2'-O-methyl modified nucleotide
  modified_base 76: mod_base = OTHER; note = 2'-O-methyl modified nucleotide
  modified_base 77: mod_base = OTHER; note = 2'-O-methyl modified nucleotide
  modified_base 78: mod_base = OTHER; note = 2'-O-methyl modified nucleotide
  modified_base 79: mod_base = OTHER; note = 2'-O-methyl modified nucleotide
  modified_base 80: mod_base = OTHER; note = 2'-O-methyl modified nucleotide
  modified_base 81: mod_base = OTHER; note = 2'-O-methyl modified nucleotide
  modified_base 82: mod_base = OTHER; note = 2'-O-methyl modified nucleotide
  modified_base 83: mod_base = OTHER; note = 2'-O-methyl modified nucleotide
  modified_base 84: mod_base = OTHER; note = 2'-O-methyl modified nucleotide
  modified_base 85: mod_base = OTHER; note = 2'-O-methyl modified nucleotide
  modified_base 86: mod_base = OTHER; note = 2'-O-methyl modified nucleotide
  modified_base 87: mod_base = OTHER; note = 2'-O-methyl modified nucleotide
  modified_base 88: mod_base = OTHER; note = 2'-O-methyl modified nucleotide
  modified_base 89: mod_base = OTHER; note = 2'-O-methyl modified nucleotide
  modified_base 90: mod_base = OTHER; note = 2'-O-methyl modified nucleotide
  modified_base 91: mod_base = OTHER; note = 2'-O-methyl modified nucleotide
  modified_base 92: mod_base = OTHER; note = 2'-O-methyl modified nucleotide
  modified_base 93: mod_base = OTHER; note = 2'-O-methyl modified nucleotide
  modified_base 94: mod_base = OTHER; note = 2'-O-methyl modified nucleotide
  modified_base 95: mod_base = OTHER; note = 2'-O-methyl modified nucleotide
  modified_base 96: mod_base = OTHER; note = 2'-O-methyl modified nucleotide
  modified_base 97: mod_base = OTHER; note = 2'-O-methyl modified nucleotide with phosphorothioate linkage
  modified_base 98: mod_base = OTHER; note = 2'-O-methyl modified nucleotide with phosphorothioate linkage
  modified_base 99: mod_base = OTHER; note = 2'-O-methyl modified nucleotide with phosphorothioate linkage
  modified_base 100: mod_base = OTHER; note = 2'-O-methyl modified nucleotide
actcacgctggatagcctccgttttagagctagaaatagcaagttaaaataaggctagtccgttatcaacttgaaaaagtggcaccgagtcggtgctttt

SEQ ID NO: 18217 - RNA, 80 nt, synthetic construct
  source 1..80: mol_type = other RNA
gttttagagctagaaatagcaagttaaaataaggctagtccgttatcaacttgaaaaagtggcaccgagtcggtgctttt

SEQ ID NO: 18218-30420 - skipped (12203 entries)

SEQ ID NO: 30421 - RNA, 122 nt, synthetic construct
  source 1..122: mol_type = other RNA
  modified_base 1: mod_base = OTHER; note = 2'-O-methyl modified nucleotide with phosphorothioate linkage
  modified_base 2: mod_base = OTHER; note = 2'-O-methyl modified nucleotide with phosphorothioate linkage
  modified_base 3: mod_base = OTHER; note = 2'-O-methyl modified nucleotide with phosphorothioate linkage
  modified_base 29: mod_base = OTHER; note = 2'-O-methyl modified nucleotide
  modified_base 30: mod_base = OTHER; note = 2'-O-methyl modified nucleotide
  modified_base 31: mod_base = OTHER; note = 2'-O-methyl modified nucleotide
  modified_base 32: mod_base = OTHER; note = 2'-O-methyl modified nucleotide
  modified_base 33: mod_base = OTHER; note = 2'-O-methyl modified nucleotide
  modified_base 34: mod_base = OTHER; note = 2'-O-methyl modified nucleotide
  modified_base 35: mod_base = OTHER; note = 2'-O-methyl modified nucleotide
  modified_base 36: mod_base = OTHER; note = 2'-O-methyl modified nucleotide
  modified_base 37: mod_base = OTHER; note = 2'-O-methyl modified nucleotide
  modified_base 38: mod_base = OTHER; note = 2'-O-methyl modified nucleotide
  modified_base 39: mod_base = OTHER; note = 2'-O-methyl modified nucleotide
  modified_base 40: mod_base = OTHER; note = 2'-O-methyl modified nucleotide
  modified_base 69: mod_base = OTHER; note = 2'-O-methyl modified nucleotide
  modified_base 70: mod_base = OTHER; note = 2'-O-methyl modified nucleotide
  modified_base 71: mod_base = OTHER; note = 2'-O-methyl modified nucleotide
  modified_base 72: mod_base = OTHER; note = 2'-O-methyl modified nucleotide
  modified_base 73: mod_base = OTHER; note = 2'-O-methyl modified nucleotide
  modified_base 74: mod_base = OTHER; note = 2'-O-methyl modified nucleotide
  modified_base 75: mod_base = OTHER; note = 2'-O-methyl modified nucleotide
  modified_base 76: mod_base = OTHER; note = 2'-O-methyl modified nucleotide
  modified_base 77: mod_base = OTHER; note = 2'-O-methyl modified nucleotide
  modified_base 78: mod_base = OTHER; note = 2'-O-methyl modified nucleotide
  modified_base 79: mod_base = OTHER; note = 2'-O-methyl modified nucleotide
  modified_base 80: mod_base = OTHER; note = 2'-O-methyl modified nucleotide
  modified_base 81: mod_base = OTHER; note = 2'-O-methyl modified nucleotide
  modified_base 82: mod_base = OTHER; note = 2'-O-methyl modified nucleotide
  modified_base 83: mod_base = OTHER; note = 2'-O-methyl modified nucleotide
  modified_base 84: mod_base = OTHER; note = 2'-O-methyl modified nucleotide
  modified_base 85: mod_base = OTHER; note = 2'-O-methyl modified nucleotide
  modified_base 86: mod_base = OTHER; note = 2'-O-methyl modified nucleotide
  modified_base 87: mod_base = OTHER; note = 2'-O-methyl modified nucleotide
  modified_base 88: mod_base = OTHER; note = 2'-O-methyl modified nucleotide
  modified_base 89: mod_base = OTHER; note = 2'-O-methyl modified nucleotide
  modified_base 90: mod_base = OTHER; note = 2'-O-methyl modified nucleotide
  modified_base 91: mod_base = OTHER; note = 2'-O-methyl modified nucleotide
  modified_base 92: mod_base = OTHER; note = 2'-O-methyl modified nucleotide
  modified_base 93: mod_base = OTHER; note = 2'-O-methyl modified nucleotide
  modified_base 94: mod_base = OTHER; note = 2'-O-methyl modified nucleotide
  modified_base 95: mod_base = OTHER; note = 2'-O-methyl modified nucleotide
  modified_base 96: mod_base = OTHER; note = 2'-O-methyl modified nucleotide
  modified_base 119: mod_base = OTHER; note = Nucleotide with phosphorothioate linkage
  modified_base 120: mod_base = OTHER; note = 2'-O-methyl modified nucleotide with phosphorothioate linkage
  modified_base 121: mod_base = OTHER; note = 2'-O-methyl modified nucleotide with phosphorothioate linkage
  modified_base 122: mod_base = OTHER; note = 2'-O-methyl modified nucleotide
ggatggtcctcatgaacgacgttttagagctagaaatagcaagttaaaataaggctagtccgttatcaacttgaaaaagtggcaccgagtcggtgcttaccgctccagtcgttcatgaggac

SEQ ID NO: 30422 - RNA, 121 nt, synthetic construct
  source 1..121: mol_type = other RNA
  modified_base 1: mod_base = OTHER; note = 2'-O-methyl modified nucleotide with phosphorothioate linkage
  modified_base 2: mod_base = OTHER; note = 2'-O-methyl modified nucleotide with phosphorothioate linkage
  modified_base 3: mod_base = OTHER; note = 2'-O-methyl modified nucleotide with phosphorothioate linkage
  modified_base 29: mod_base = OTHER; note = 2'-O-methyl modified nucleotide
  modified_base 30: mod_base = OTHER; note = 2'-O-methyl modified nucleotide
  modified_base 31: mod_base = OTHER; note = 2'-O-methyl modified nucleotide
  modified_base 32: mod_base = OTHER; note = 2'-O-methyl modified nucleotide
  modified_base 33: mod_base = OTHER; note = 2'-O-methyl modified nucleotide
  modified_base 34: mod_base = OTHER; note = 2'-O-methyl modified nucleotide
  modified_base 35: mod_base = OTHER; note = 2'-O-methyl modified nucleotide
  modified_base 36: mod_base = OTHER; note = 2'-O-methyl modified nucleotide
  modified_base 37: mod_base = OTHER; note = 2'-O-methyl modified nucleotide
  modified_base 38: mod_base = OTHER; note = 2'-O-methyl modified nucleotide
  modified_base 39: mod_base = OTHER; note = 2'-O-methyl modified nucleotide
  modified_base 40: mod_base = OTHER; note = 2'-O-methyl modified nucleotide
  modified_base 69: mod_base = OTHER; note = 2'-O-methyl modified nucleotide
  modified_base 70: mod_base = OTHER; note = 2'-O-methyl modified nucleotide
  modified_base 71: mod_base = OTHER; note = 2'-O-methyl modified nucleotide
  modified_base 72: mod_base = OTHER; note = 2'-O-methyl modified nucleotide
  modified_base 73: mod_base = OTHER; note = 2'-O-methyl modified nucleotide
  modified_base 74: mod_base = OTHER; note = 2'-O-methyl modified nucleotide
  modified_base 75: mod_base = OTHER; note = 2'-O-methyl modified nucleotide
  modified_base 76: mod_base = OTHER; note = 2'-O-methyl modified nucleotide
  modified_base 77: mod_base = OTHER; note = 2'-O-methyl modified nucleotide
  modified_base 78: mod_base = OTHER; note = 2'-O-methyl modified nucleotide
  modified_base 79: mod_base = OTHER; note = 2'-O-methyl modified nucleotide
  modified_base 80: mod_base = OTHER; note = 2'-O-methyl modified nucleotide
  modified_base 81: mod_base = OTHER; note = 2'-O-methyl modified nucleotide
  modified_base 82: mod_base = OTHER; note = 2'-O-methyl modified nucleotide
  modified_base 83: mod_base = OTHER; note = 2'-O-methyl modified nucleotide
  modified_base 84: mod_base = OTHER; note = 2'-O-methyl modified nucleotide
  modified_base 85: mod_base = OTHER; note = 2'-O-methyl modified nucleotide
  modified_base 86: mod_base = OTHER; note = 2'-O-methyl modified nucleotide
  modified_base 87: mod_base = OTHER; note = 2'-O-methyl modified nucleotide
  modified_base 88: mod_base = OTHER; note = 2'-O-methyl modified nucleotide
  modified_base 89: mod_base = OTHER; note = 2'-O-methyl modified nucleotide
  modified_base 90: mod_base = OTHER; note = 2'-O-methyl modified nucleotide
  modified_base 91: mod_base = OTHER; note = 2'-O-methyl modified nucleotide
  modified_base 92: mod_base = OTHER; note = 2'-O-methyl modified nucleotide
  modified_base 93: mod_base = OTHER; note = 2'-O-methyl modified nucleotide
  modified_base 94: mod_base = OTHER; note = 2'-O-methyl modified nucleotide
  modified_base 95: mod_base = OTHER; note = 2'-O-methyl modified nucleotide
  modified_base 96: mod_base = OTHER; note = 2'-O-methyl modified nucleotide
  modified_base 118: mod_base = OTHER; note = Nucleotide with phosphorothioate linkage
  modified_base 119: mod_base = OTHER; note = 2'-O-methyl modified nucleotide with phosphorothioate linkage
  modified_base 120: mod_base = OTHER; note = 2'-O-methyl modified nucleotide with phosphorothioate linkage
  modified_base 121: mod_base = OTHER; note = 2'-O-methyl modified nucleotide
ggatggtcctcatgaacgacgttttagagctagaaatagcaagttaaaataaggctagtccgttatcaacttgaaaaagtggcaccgagtcggtgcattaccgctccagtcgttcatgagg

SEQ ID NO: 30423 - RNA, 126 nt, synthetic construct
  source 1..126: mol_type = other RNA
  modified_base 1: mod_base = OTHER; note = 2'-O-methyl modified nucleotide with phosphorothioate linkage
  modified_base 2: mod_base = OTHER; note = 2'-O-methyl modified nucleotide with phosphorothioate linkage
  modified_base 3: mod_base = OTHER; note = 2'-O-methyl modified nucleotide with phosphorothioate linkage
  modified_base 29: mod_base = OTHER; note = 2'-O-methyl modified nucleotide
  modified_base 30: mod_base = OTHER; note = 2'-O-methyl modified nucleotide
  modified_base 31: mod_base = OTHER; note = 2'-O-methyl modified nucleotide
  modified_base 32: mod_base = OTHER; note = 2'-O-methyl modified nucleotide
  modified_base 33: mod_base = OTHER; note = 2'-O-methyl modified nucleotide
  modified_base 34: mod_base = OTHER; note = 2'-O-methyl modified nucleotide
  modified_base 35: mod_base = OTHER; note = 2'-O-methyl modified nucleotide
  modified_base 36: mod_base = OTHER; note = 2'-O-methyl modified nucleotide
  modified_base 37: mod_base = OTHER; note = 2'-O-methyl modified nucleotide
  modified_base 38: mod_base = OTHER; note = 2'-O-methyl modified nucleotide
  modified_base 39: mod_base = OTHER; note = 2'-O-methyl modified nucleotide
  modified_base 40: mod_base = OTHER; note = 2'-O-methyl modified nucleotide
  modified_base 69: mod_base = OTHER; note = 2'-O-methyl modified nucleotide
  modified_base 70: mod_base = OTHER; note = 2'-O-methyl modified nucleotide
  modified_base 71: mod_base = OTHER; note = 2'-O-methyl modified nucleotide
  modified_base 72: mod_base = OTHER; note = 2'-O-methyl modified nucleotide
  modified_base 73: mod_base = OTHER; note = 2'-O-methyl modified nucleotide
  modified_base 74: mod_base = OTHER; note = 2'-O-methyl modified nucleotide
  modified_base 75: mod_base = OTHER; note = 2'-O-methyl modified nucleotide
  modified_base 76: mod_base = OTHER; note = 2'-O-methyl modified nucleotide
  modified_base 77: mod_base = OTHER; note = 2'-O-methyl modified nucleotide
  modified_base 78: mod_base = OTHER; note = 2'-O-methyl modified nucleotide
  modified_base 79: mod_base = OTHER; note = 2'-O-methyl modified nucleotide
  modified_base 80: mod_base = OTHER; note = 2'-O-methyl modified nucleotide
  modified_base 81: mod_base = OTHER; note = 2'-O-methyl modified nucleotide
  modified_base 82: mod_base = OTHER; note = 2'-O-methyl modified nucleotide
  modified_base 83: mod_base = OTHER; note = 2'-O-methyl modified nucleotide
  modified_base 84: mod_base = OTHER; note = 2'-O-methyl modified nucleotide
  modified_base 85: mod_base = OTHER; note = 2'-O-methyl modified nucleotide
  modified_base 86: mod_base = OTHER; note = 2'-O-methyl modified nucleotide
  modified_base 87: mod_base = OTHER; note = 2'-O-methyl modified nucleotide
  modified_base 88: mod_base = OTHER; note = 2'-O-methyl modified nucleotide
  modified_base 89: mod_base = OTHER; note = 2'-O-methyl modified nucleotide
  modified_base 90: mod_base = OTHER; note = 2'-O-methyl modified nucleotide
  modified_base 91: mod_base = OTHER; note = 2'-O-methyl modified nucleotide
  modified_base 92: mod_base = OTHER; note = 2'-O-methyl modified nucleotide
  modified_base 93: mod_base = OTHER; note = 2'-O-methyl modified nucleotide
  modified_base 94: mod_base = OTHER; note = 2'-O-methyl modified nucleotide
  modified_base 95: mod_base = OTHER; note = 2'-O-methyl modified nucleotide
  modified_base 96: mod_base = OTHER; note = 2'-O-methyl modified nucleotide
  modified_base 123: mod_base = OTHER; note = Nucleotide with phosphorothioate linkage
  modified_base 124: mod_base = OTHER; note = 2'-O-methyl modified nucleotide with phosphorothioate linkage
  modified_base 125: mod_base = OTHER; note = 2'-O-methyl modified nucleotide with phosphorothioate linkage
  modified_base 126: mod_base = OTHER; note = 2'-O-methyl modified nucleotide
tcagaggaagctgggccaccgttttagagctagaaatagcaagttaaaataaggctagtccgttatcaacttgaaaaagtggcaccgagtcggtgctggagcggtaatggctggtggcccagcttc

SEQ ID NO: 30424 - RNA, 128 nt, synthetic construct
  source 1..128: mol_type = other RNA
  modified_base 1: mod_base = OTHER; note = 2'-O-methyl modified nucleotide with phosphorothioate linkage
  modified_base 2: mod_base = OTHER; note = 2'-O-methyl modified nucleotide with phosphorothioate linkage
  modified_base 3: mod_base = OTHER; note = 2'-O-methyl modified nucleotide with phosphorothioate linkage
  modified_base 29: mod_base = OTHER; note = 2'-O-methyl modified nucleotide
  modified_base 30: mod_base = OTHER; note = 2'-O-methyl modified nucleotide
  modified_base 31: mod_base = OTHER; note = 2'-O-methyl modified nucleotide
  modified_base 32: mod_base = OTHER; note = 2'-O-methyl modified nucleotide
  modified_base 33: mod_base = OTHER; note = 2'-O-methyl modified nucleotide
  modified_base 34: mod_base = OTHER; note = 2'-O-methyl modified nucleotide
  modified_base 35: mod_base = OTHER; note = 2'-O-methyl modified nucleotide
  modified_base 36: mod_base = OTHER; note = 2'-O-methyl modified nucleotide
  modified_base 37: mod_base = OTHER; note = 2'-O-methyl modified nucleotide
  modified_base 38: mod_base = OTHER; note = 2'-O-methyl modified nucleotide
  modified_base 39: mod_base = OTHER; note = 2'-O-methyl modified nucleotide
  modified_base 40: mod_base = OTHER; note = 2'-O-methyl modified nucleotide
  modified_base 69: mod_base = OTHER; note = 2'-O-methyl modified nucleotide
  modified_base 70: mod_base = OTHER; note = 2'-O-methyl modified nucleotide
  modified_base 71: mod_base = OTHER; note = 2'-O-methyl modified nucleotide
  modified_base 72: mod_base = OTHER; note = 2'-O-methyl modified nucleotide
  modified_base 73: mod_base = OTHER; note = 2'-O-methyl modified nucleotide
  modified_base 74: mod_base = OTHER; note = 2'-O-methyl modified nucleotide
  modified_base 75: mod_base = OTHER; note = 2'-O-methyl modified nucleotide
  modified_base 76: mod_base = OTHER; note = 2'-O-methyl modified nucleotide
  modified_base 77: mod_base = OTHER; note = 2'-O-methyl modified nucleotide
  modified_base 78: mod_base = OTHER; note = 2'-O-methyl modified nucleotide
  modified_base 79: mod_base = OTHER; note = 2'-O-methyl modified nucleotide
  modified_base 80: mod_base = OTHER; note = 2'-O-methyl modified nucleotide
  modified_base 81: mod_base = OTHER; note = 2'-O-methyl modified nucleotide
  modified_base 82: mod_base = OTHER; note = 2'-O-methyl modified nucleotide
  modified_base 83: mod_base = OTHER; note = 2'-O-methyl modified nucleotide
  modified_base 84: mod_base = OTHER; note = 2'-O-methyl modified nucleotide
  modified_base 85: mod_base = OTHER; note = 2'-O-methyl modified nucleotide
  modified_base 86: mod_base = OTHER; note = 2'-O-methyl modified nucleotide
  modified_base 87: mod_base = OTHER; note = 2'-O-methyl modified nucleotide
  modified_base 88: mod_base = OTHER; note = 2'-O-methyl modified nucleotide
  modified_base 89: mod_base = OTHER; note = 2'-O-methyl modified nucleotide
  modified_base 90: mod_base = OTHER; note = 2'-O-methyl modified nucleotide
  modified_base 91: mod_base = OTHER; note = 2'-O-methyl modified nucleotide
  modified_base 92: mod_base = OTHER; note = 2'-O-methyl modified nucleotide
  modified_base 93: mod_base = OTHER; note = 2'-O-methyl modified nucleotide
  modified_base 94: mod_base = OTHER; note = 2'-O-methyl modified nucleotide
  modified_base 95: mod_base = OTHER; note = 2'-O-methyl modified nucleotide
  modified_base 96: mod_base = OTHER; note = 2'-O-methyl modified nucleotide
  modified_base 125: mod_base = OTHER; note = Nucleotide with phosphorothioate linkage
  modified_base 126: mod_base = OTHER; note = 2'-O-methyl modified nucleotide with phosphorothioate linkage
  modified_base 127: mod_base = OTHER; note = 2'-O-methyl modified nucleotide with phosphorothioate linkage
  modified_base 128: mod_base = OTHER; note = 2'-O-methyl modified nucleotide
tcagaggaagctgggccaccgttttagagctagaaatagcaagttaaaataaggctagtccgttatcaacttgaaaaagtggcaccgagtcggtgctggagcggtaatggctggtggcccagcttcct

SEQ ID NO: 30425 - RNA, 127 nt, synthetic construct
  source 1..127: mol_type = other RNA
  modified_base 1: mod_base = OTHER; note = 2'-O-methyl modified nucleotide with phosphorothioate linkage
  modified_base 2: mod_base = OTHER; note = 2'-O-methyl modified nucleotide with phosphorothioate linkage
  modified_base 3: mod_base = OTHER; note = 2'-O-methyl modified nucleotide with phosphorothioate linkage
  modified_base 29: mod_base = OTHER; note = 2'-O-methyl modified nucleotide
  modified_base 30: mod_base = OTHER; note = 2'-O-methyl modified nucleotide
  modified_base 31: mod_base = OTHER; note = 2'-O-methyl modified nucleotide
  modified_base 32: mod_base = OTHER; note = 2'-O-methyl modified nucleotide
  modified_base 33: mod_base = OTHER; note = 2'-O-methyl modified nucleotide
  modified_base 34: mod_base = OTHER; note = 2'-O-methyl modified nucleotide
  modified_base 35: mod_base = OTHER; note = 2'-O-methyl modified nucleotide
  modified_base 36: mod_base = OTHER; note = 2'-O-methyl modified nucleotide
  modified_base 37: mod_base = OTHER; note = 2'-O-methyl modified nucleotide
  modified_base 38: mod_base = OTHER; note = 2'-O-methyl modified nucleotide
  modified_base 39: mod_base = OTHER; note = 2'-O-methyl modified nucleotide
  modified_base 40: mod_base = OTHER; note = 2'-O-methyl modified nucleotide
  modified_base 69: mod_base = OTHER; note = 2'-O-methyl modified nucleotide
  modified_base 70: mod_base = OTHER; note = 2'-O-methyl modified nucleotide
  modified_base 71: mod_base = OTHER; note = 2'-O-methyl modified nucleotide
  modified_base 72: mod_base = OTHER; note = 2'-O-methyl modified nucleotide
  modified_base 73: mod_base = OTHER; note = 2'-O-methyl modified nucleotide
  modified_base 74: mod_base = OTHER; note = 2'-O-methyl modified nucleotide
  modified_base 75: mod_base = OTHER; note = 2'-O-methyl modified nucleotide
  modified_base 76: mod_base = OTHER; note = 2'-O-methyl modified nucleotide
  modified_base 77: mod_base = OTHER; note = 2'-O-methyl modified nucleotide
  modified_base 78: mod_base = OTHER; note = 2'-O-methyl modified nucleotide
  modified_base 79: mod_base = OTHER; note = 2'-O-methyl modified nucleotide
  modified_base 80: mod_base = OTHER; note = 2'-O-methyl modified nucleotide
  modified_base 81: mod_base = OTHER; note = 2'-O-methyl modified nucleotide
  modified_base 82: mod_base = OTHER; note = 2'-O-methyl modified nucleotide
  modified_base 83: mod_base = OTHER; note = 2'-O-methyl modified nucleotide
  modified_base 84: mod_base = OTHER; note = 2'-O-methyl modified nucleotide
  modified_base 85: mod_base = OTHER; note = 2'-O-methyl modified nucleotide
  modified_base 86: mod_base = OTHER; note = 2'-O-methyl modified nucleotide
  modified_base 87: mod_base = OTHER; note = 2'-O-methyl modified nucleotide
  modified_base 88: mod_base = OTHER; note = 2'-O-methyl modified nucleotide
  modified_base 89: mod_base = OTHER; note = 2'-O-methyl modified nucleotide
  modified_base 90: mod_base = OTHER; note = 2'-O-methyl modified nucleotide
  modified_base 91: mod_base = OTHER; note = 2'-O-methyl modified nucleotide
  modified_base 92: mod_base = OTHER; note = 2'-O-methyl modified nucleotide
  modified_base 93: mod_base = OTHER; note = 2'-O-methyl modified nucleotide
  modified_base 94: mod_base = OTHER; note = 2'-O-methyl modified nucleotide
  modified_base 95: mod_base = OTHER; note = 2'-O-methyl modified nucleotide
  modified_base 96: mod_base = OTHER; note = 2'-O-methyl modified nucleotide
  modified_base 124: mod_base = OTHER; note = Nucleotide with phosphorothioate linkage
  modified_base 125: mod_base = OTHER; note = 2'-O-methyl modified nucleotide with phosphorothioate linkage
  modified_base 126: mod_base = OTHER; note = 2'-O-methyl modified nucleotide with phosphorothioate linkage
  modified_base 127: mod_base = OTHER; note = 2'-O-methyl modified nucleotide
ggatggtcctcatgaacgacgttttagagctagaaatagcaagttaaaataaggctagtccgttatcaacttgaaaaagtggcaccgagtcggtgcaggcattaccgctccagtcgttcatgaggac

SEQ ID NO: 30426 - RNA, 125 nt, synthetic construct
  source 1..125: mol_type = other RNA
  modified_base 1: mod_base = OTHER; note = 2'-O-methyl modified nucleotide with phosphorothioate linkage
  modified_base 2: mod_base = OTHER; note = 2'-O-methyl modified nucleotide with phosphorothioate linkage
  modified_base 3: mod_base = OTHER; note = 2'-O-methyl modified nucleotide with phosphorothioate linkage
  modified_base 29: mod_base = OTHER; note = 2'-O-methyl modified nucleotide
  modified_base 30: mod_base = OTHER; note = 2'-O-methyl modified nucleotide
  modified_base 31: mod_base = OTHER; note = 2'-O-methyl modified nucleotide
  modified_base 32: mod_base = OTHER; note = 2'-O-methyl modified nucleotide
  modified_base 33: mod_base = OTHER; note = 2'-O-methyl modified nucleotide
  modified_base 34: mod_base = OTHER; note = 2'-O-methyl modified nucleotide
  modified_base 35: mod_base = OTHER; note = 2'-O-methyl modified nucleotide
  modified_base 36: mod_base = OTHER; note = 2'-O-methyl modified nucleotide
  modified_base 37: mod_base = OTHER; note = 2'-O-methyl modified nucleotide
  modified_base 38: mod_base = OTHER; note = 2'-O-methyl modified nucleotide
  modified_base 39: mod_base = OTHER; note = 2'-O-methyl modified nucleotide
  modified_base 40: mod_base = OTHER; note = 2'-O-methyl modified nucleotide
  modified_base 69: mod_base = OTHER; note = 2'-O-methyl modified nucleotide
  modified_base 70: mod_base = OTHER; note = 2'-O-methyl modified nucleotide
  modified_base 71: mod_base = OTHER; note = 2'-O-methyl modified nucleotide
  modified_base 72: mod_base = OTHER; note = 2'-O-methyl modified nucleotide
  modified_base 73: mod_base = OTHER; note = 2'-O-methyl modified nucleotide
  modified_base 74: mod_base = OTHER; note = 2'-O-methyl modified nucleotide
  modified_base 75: mod_base = OTHER; note = 2'-O-methyl modified nucleotide
  modified_base 76: mod_base = OTHER; note = 2'-O-methyl modified nucleotide
  modified_base 77: mod_base = OTHER; note = 2'-O-methyl modified nucleotide
  modified_base 78: mod_base = OTHER; note = 2'-O-methyl modified nucleotide
  modified_base 79: mod_base = OTHER; note = 2'-O-methyl modified nucleotide
  modified_base 80: mod_base = OTHER; note = 2'-O-methyl modified nucleotide
  modified_base 81: mod_base = OTHER; note = 2'-O-methyl modified nucleotide
  modified_base 82: mod_base = OTHER; note = 2'-O-methyl modified nucleotide
  modified_base 83: mod_base = OTHER; note = 2'-O-methyl modified nucleotide
  modified_base 84: mod_base = OTHER; note = 2'-O-methyl modified nucleotide
  modified_base 85: mod_base = OTHER; note = 2'-O-methyl modified nucleotide
  modified_base 86: mod_base = OTHER; note = 2'-O-methyl modified nucleotide
  modified_base 87: mod_base = OTHER; note = 2'-O-methyl modified nucleotide
  modified_base 88: mod_base = OTHER; note = 2'-O-methyl modified nucleotide
  modified_base 89: mod_base = OTHER; note = 2'-O-methyl modified nucleotide
  modified_base 90: mod_base = OTHER; note = 2'-O-methyl modified nucleotide
  modified_base 91: mod_base = OTHER; note = 2'-O-methyl modified nucleotide
  modified_base 92: mod_base = OTHER; note = 2'-O-methyl modified nucleotide
  modified_base 93: mod_base = OTHER; note = 2'-O-methyl modified nucleotide
  modified_base 94: mod_base = OTHER; note = 2'-O-methyl modified nucleotide
  modified_base 95: mod_base = OTHER; note = 2'-O-methyl modified nucleotide
  modified_base 96: mod_base = OTHER; note = 2'-O-methyl modified nucleotide
  modified_base 122: mod_base = OTHER; note = Nucleotide with phosphorothioate linkage
  modified_base 123: mod_base = OTHER; note = 2'-O-methyl modified nucleotide with phosphorothioate linkage
  modified_base 124: mod_base = OTHER; note = 2'-O-methyl modified nucleotide with phosphorothioate linkage
  modified_base 125: mod_base = OTHER; note = 2'-O-methyl modified nucleotide
ggatggtcctcatgaacgacgttttagagctagaaatagcaagttaaaataaggctagtccgttatcaacttgaaaaagtggcaccgagtcggtgcaggcattaccgctccagtcgttcatgagg

SEQ ID NO: 30427 - protein, 2122 aa, synthetic construct; identical to SEQ ID NO: 15008

SEQ ID NO: 30428 - protein, 2122 aa, synthetic construct
MPAAKRVKLDGGDKKYSIGLDIGTNSVGWAVITDEYKVPSKKFKVLGNTDRHSIKKNLIGALLFDSGETAEATRLKRTARRRYTRRKNRICYLQEIFSNEMAKVDDSFFHRLEESFLVEEDKKHERHPIFGNIVDEVAYHEKYPTIYHLRKKLVDSTDKADLRLIYLALAHMIKFRGHFLIEGDLNPDNSDVDKLFIQLVQTYNQLFEENPINASGVDAKAILSARLSKSRRLENLIAQLPGEKKNGLFGNLIALSLGLTPNFKSNFDLAEDAKLQLSKDTYDDDLDNLLAQIGDQYADLFLAAKNLSDAILLSDILRVNTEITKAPLSASMIKRYDEHHQDLTLLKALVRQQLPEKYKEIFFDQSKNGYAGYIDGGASQEEFYKFIKPILEKMDGTEELLVKLNREDLLRKQRTFDNGSIPHQIHLGELHAILRRQEDFYPFLKDNREKIEKILTFRIPYYVGPLARGNSRFAWMTRKSEETITPWNFEEVVDKGASAQSFIERMTNFDKNLPNEKVLPKHSLLYEYFTVYNELTKVKYVTEGMRKPAFLSGEQKKAIVDLLFKTNRKVTVKQLKEDYFKKIECFDSVEISGVEDRFNASLGTYHDLLKIIKDKDFLDNEENEDILEDIVLTLTLFEDREMIEERLKTYAHLFDDKVMKQLKRRRYTGWGRLSRKLINGIRDKQSGKTILDFLKSDGFANRNFMQLIHDDSLTFKEDIQKAQVSGQGDSLHEHIANLAGSPAIKKGILQTVKVVDELVKVMGRHKPENIVIEMARENQTTQKGQKNSRERMKRIEEGIKELGSQILKEHPVENTQLQNEKLYLYYLQNGRDMYVDQELDINRLSDYDVDHIVPQSFLKDDSIDNKVLTRSDKNRGKSDNVPSEEVVKKMKNYWRQLLNAKLITQRKFDNLTKAERGGLSELDKAGFIKRQLVETRQITKHVAQILDSRMNTKYDENDKLIREVKVITLKSKLVSDFRKDFQFYKVREINNYHHAHDAYLNAVVGTALIKKYPKLESEFVYGDYKVYDVRKMIAKSEQEIGKATAKYFFYSNIMNFFKTEITLANGEIRKRPLIETNGETGEIVWDKGRDFATVRKVLSMPQVNIVKKTEVQTGGFSKESILPKRNSDKLIARKKDWDPKKYGGFDSPTVAYSVLVVAKVEKGKSKKLKSVKELLGITIMERSSFEKNPIDFLEAKGYKEVKKDLIIKLPKYSLFELENGRKRMLASAGELQKGNELALPSKYVNFLYLASHYEKLKGSPEDNEQKQLFVEQHKHYLDEIIEQISEFSKRVILADANLDKVLSAYNKHRDKPIREQAENIIHLFTLTNLGAPAAFKYFDTTIDRKRYTSTKEVLDATLIHQSITGLYETRIDLSQLGGDSGGSSGGSSGSETPGTSESATPESSGGSSGGSSTLNIEDEYRLHETSKEPDVSLGSTWLSDFPQAWAETGGMGLAVRQAPLIIPLKATSTPVSIKQYPMSQEARLGIKPHIQRLLDQGILVPCQSPWNTPLLPVKKPGTNDYRPVQDLREVNKRVEDIHPTVPNPYNLLSGLPPSHQWYTVLDLKDAFFCLRLHPTSQPLFAFEWRDPEMGISGQLTWTRLPQGFKNSPTLFNEALHRDLADFRIQHPDLILLQYVDDLLLAATSELDCQQGTRALLQTLGNLGYRASAKKAQICQKQVKYLGYLLKEGQRWLTEARKETVMGQPTPKTPRQLREFLGKAGFCRLFIPGFAEMAAPLYPLTKPGTLFNWGPDQQKAYQEIKQALLTAPALGLPDLTKPFELFVDEKQGYAKGVLTQKLGPWRRPVAYLSKKLDPVAAGWPPCLRMVAAIAVLTKDAGKLTMGQPLVILAPHAVEALVKQPPDRWLSNARMTHYQALLLDTDRVQFGPVVALNPATLLPLPEEGLQHNCLDILAEAHGTRPDLTDQPLPDADHTWYTDGSSLLQEGQRKAGAAVTTETEVIWAKALPAGTSAQRAELIALTQALKMAEGKKLNVYTDSRYAFATAHIHGEIYRRRGWLTSEGKEIKNKDEILALLKALFLPKRLSIIHCPGHQKGHSAEARGNRMADQAARKAAITETPDTSTLLIENSSPSGGSKRTADGSEFEKRTADGSEFESPKKKAKVE

SEQ ID NO: 30429 - RNA, 122 nt, synthetic construct; identical to SEQ ID NO: 30421
  source 1..122: mol_type = other RNA
  modified_base 1: mod_base = OTHER; note = 2'-O-methyl modified nucleotide with phosphorothioate linkage
  modified_base 2: mod_base = OTHER; note = 2'-O-methyl modified nucleotide with phosphorothioate linkage
  modified_base 3: mod_base = OTHER; note = 2'-O-methyl modified nucleotide with phosphorothioate linkage
  modified_base 29: mod_base = OTHER; note = 2'-O-methyl modified nucleotide
  modified_base 30: mod_base = OTHER; note = 2'-O-methyl modified nucleotide
  modified_base 31: mod_base = OTHER; note = 2'-O-methyl modified nucleotide
  modified_base 32: mod_base = OTHER; note = 2'-O-methyl modified nucleotide
  modified_base 33: mod_base = OTHER; note = 2'-O-methyl modified nucleotide
  modified_base 34: mod_base = OTHER; note = 2'-O-methyl modified nucleotide
  modified_base 35: mod_base = OTHER; note = 2'-O-methyl modified nucleotide
  modified_base 36: mod_base = OTHER; note = 2'-O-methyl modified nucleotide
  modified_base 37: mod_base = OTHER; note = 2'-O-methyl modified nucleotide
  modified_base 38: mod_base = OTHER; note = 2'-O-methyl modified nucleotide
  modified_base 39: mod_base = OTHER; note = 2'-O-methyl modified nucleotide
  modified_base 40: mod_base = OTHER; note = 2'-O-methyl modified nucleotide
  modified_base 69: mod_base = OTHER; note = 2'-O-methyl modified nucleotide
  modified_base 70: mod_base = OTHER; note = 2'-O-methyl modified nucleotide
  modified_base 71: mod_base = OTHER; note = 2'-O-methyl modified nucleotide
  modified_base 72: mod_base = OTHER; note = 2'-O-methyl modified nucleotide
  modified_base 73: mod_base = OTHER; note = 2'-O-methyl modified nucleotide
  modified_base 74: mod_base = OTHER; note = 2'-O-methyl modified nucleotide
  modified_base 75: mod_base = OTHER; note = 2'-O-methyl modified nucleotide
  modified_base 76: mod_base = OTHER; note = 2'-O-methyl modified nucleotide
  modified_base 77: mod_base = OTHER; note = 2'-O-methyl modified nucleotide
  modified_base 78: mod_base = OTHER; note = 2'-O-methyl modified nucleotide
  modified_base 79: mod_base = OTHER; note = 2'-O-methyl modified nucleotide
  modified_base 80: mod_base = OTHER; note = 2'-O-methyl modified nucleotide
  modified_base 81: mod_base = OTHER; note = 2'-O-methyl modified nucleotide
  modified_base 82: mod_base = OTHER; note = 2'-O-methyl modified nucleotide
  modified_base 83: mod_base = OTHER; note = 2'-O-methyl modified nucleotide
  modified_base 84: mod_base = OTHER; note = 2'-O-methyl modified nucleotide
  modified_base 85: mod_base = OTHER; note = 2'-O-methyl modified nucleotide
  modified_base 86: mod_base = OTHER; note = 2'-O-methyl modified nucleotide
  modified_base 87: mod_base = OTHER; note = 2'-O-methyl modified nucleotide
  modified_base 88: mod_base = OTHER; note = 2'-O-methyl modified nucleotide
  modified_base 89: mod_base = OTHER; note = 2'-O-methyl modified nucleotide
  modified_base 90: mod_base = OTHER; note = 2'-O-methyl modified nucleotide
  modified_base 91: mod_base = OTHER; note = 2'-O-methyl modified nucleotide
  modified_base 92: mod_base = OTHER; note = 2'-O-methyl modified nucleotide
  modified_base 93: mod_base = OTHER; note = 2'-O-methyl modified nucleotide
  modified_base 94: mod_base = OTHER; note = 2'-O-methyl modified nucleotide
  modified_base 95: mod_base = OTHER; note = 2'-O-methyl modified nucleotide
  modified_base 96: mod_base = OTHER; note = 2'-O-methyl modified nucleotide
  modified_base 119: mod_base = OTHER; note = Nucleotide with phosphorothioate linkage
  modified_base 120: mod_base = OTHER; note = 2'-O-methyl modified nucleotide with phosphorothioate linkage
  modified_base 121: mod_base = OTHER; note = 2'-O-methyl modified nucleotide with phosphorothioate linkage
  modified_base 122: mod_base = OTHER; note = 2'-O-methyl modified nucleotide

SEQ ID NO: 30430 - RNA, 121 nt, synthetic construct; identical to SEQ ID NO: 30422
  source 1..121: mol_type = other RNA
  modified_base 1: mod_base = OTHER; note = 2'-O-methyl modified nucleotide with phosphorothioate linkage
  modified_base 2: mod_base = OTHER; note = 2'-O-methyl modified nucleotide with phosphorothioate linkage
  modified_base 3: mod_base = OTHER; note = 2'-O-methyl modified nucleotide with phosphorothioate linkage
  modified_base 29: mod_base = OTHER; note = 2'-O-methyl modified nucleotide
  modified_base 30: mod_base = OTHER; note = 2'-O-methyl modified nucleotide
  modified_base 31: mod_base = OTHER; note = 2'-O-methyl modified nucleotide
  modified_base 32: mod_base = OTHER; note = 2'-O-methyl modified nucleotide
  modified_base 33: mod_base = OTHER; note = 2'-O-methyl modified nucleotide
  modified_base 34: mod_base = OTHER; note = 2'-O-methyl modified nucleotide
  modified_base 35: mod_base = OTHER; note = 2'-O-methyl modified nucleotide
  modified_base 36: mod_base = OTHER; note = 2'-O-methyl modified nucleotide
  modified_base 37: mod_base = OTHER; note = 2'-O-methyl modified nucleotide
  modified_base 38: mod_base = OTHER; note = 2'-O-methyl modified nucleotide
  modified_base 39: mod_base = OTHER; note = 2'-O-methyl modified nucleotide
  modified_base 40: mod_base = OTHER; note = 2'-O-methyl modified nucleotide
  modified_base 69: mod_base = OTHER; note = 2'-O-methyl modified nucleotide
  modified_base 70: mod_base = OTHER; note = 2'-O-methyl modified nucleotide
  modified_base 71: mod_base = OTHER; note = 2'-O-methyl modified nucleotide
  modified_base 72: mod_base = OTHER; note = 2'-O-methyl modified nucleotide
  modified_base 73: mod_base = OTHER; note = 2'-O-methyl modified nucleotide
  modified_base 74: mod_base = OTHER; note = 2'-O-methyl modified nucleotide
  modified_base 75: mod_base = OTHER; note = 2'-O-methyl modified nucleotide
  modified_base 76: mod_base = OTHER; note = 2'-O-methyl modified nucleotide
  modified_base 77: mod_base = OTHER; note = 2'-O-methyl modified nucleotide
  modified_base 78: mod_base = OTHER; note = 2'-O-methyl modified nucleotide
  modified_base 79: mod_base = OTHER; note = 2'-O-methyl modified nucleotide
  modified_base 80: mod_base = OTHER; note = 2'-O-methyl modified nucleotide
  modified_base 81: mod_base = OTHER; note = 2'-O-methyl modified nucleotide
  modified_base 82: mod_base = OTHER; note = 2'-O-methyl modified nucleotide
  modified_base 83: mod_base = OTHER; note = 2'-O-methyl modified nucleotide
  modified_base 84: mod_base = OTHER; note = 2'-O-methyl modified nucleotide
  modified_base 85: mod_base = OTHER; note = 2'-O-methyl modified nucleotide
  modified_base 86: mod_base = OTHER; note = 2'-O-methyl modified nucleotide
  modified_base 87: mod_base = OTHER; note = 2'-O-methyl modified nucleotide
  modified_base 88: mod_base = OTHER; note = 2'-O-methyl modified nucleotide
  modified_base 89: mod_base = OTHER; note = 2'-O-methyl modified nucleotide
  modified_base 90: mod_base = OTHER; note = 2'-O-methyl modified nucleotide
  modified_base 91: mod_base = OTHER; note = 2'-O-methyl modified nucleotide
  modified_base 92: mod_base = OTHER; note = 2'-O-methyl modified nucleotide
  modified_base 93: mod_base = OTHER; note = 2'-O-methyl modified nucleotide
  modified_base 94: mod_base = OTHER; note = 2'-O-methyl modified nucleotide
  modified_base 95: mod_base = OTHER; note = 2'-O-methyl modified nucleotide
  modified_base 96: mod_base = OTHER; note = 2'-O-methyl modified nucleotide
  modified_base 118: mod_base = OTHER; note = Nucleotide with phosphorothioate linkage
  modified_base 119: mod_base = OTHER; note = 2'-O-methyl modified nucleotide with phosphorothioate linkage
  modified_base 120: mod_base = OTHER; note = 2'-O-methyl modified nucleotide with phosphorothioate linkage
  modified_base 121: mod_base = OTHER; note = 2'-O-methyl modified nucleotide

SEQ ID NO: 30431 - RNA, 126 nt, synthetic construct; identical to SEQ ID NO: 30423
  source 1..126: mol_type = other RNA
  modified_base 1: mod_base = OTHER; note = 2'-O-methyl modified nucleotide with phosphorothioate linkage
  modified_base 2: mod_base = OTHER; note = 2'-O-methyl modified nucleotide with phosphorothioate linkage
  modified_base 3: mod_base = OTHER; note = 2'-O-methyl modified nucleotide with phosphorothioate linkage
  modified_base 29: mod_base = OTHER; note = 2'-O-methyl modified nucleotide
  modified_base 30: mod_base = OTHER; note = 2'-O-methyl modified nucleotide
  modified_base 31: mod_base = OTHER; note = 2'-O-methyl modified nucleotide
  modified_base 32: mod_base = OTHER; note = 2'-O-methyl modified nucleotide
  modified_base 33: mod_base = OTHER; note = 2'-O-methyl modified nucleotide
  modified_base 34: mod_base = OTHER; note = 2'-O-methyl modified nucleotide
  modified_base 35: mod_base = OTHER; note = 2'-O-methyl modified nucleotide
  modified_base 36: mod_base = OTHER; note = 2'-O-methyl modified nucleotide
  modified_base 37: mod_base = OTHER; note = 2'-O-methyl modified nucleotide
  modified_base 38: mod_base = OTHER; note = 2'-O-methyl modified nucleotide
  modified_base 39: mod_base = OTHER; note = 2'-O-methyl modified nucleotide
  modified_base 40: mod_base = OTHER; note = 2'-O-methyl modified nucleotide
  modified_base 69: mod_base = OTHER; note = 2'-O-methyl modified nucleotide
  modified_base 70: mod_base = OTHER; note = 2'-O-methyl modified nucleotide
  modified_base 71: mod_base = OTHER; note = 2'-O-methyl modified nucleotide
  modified_base 72: mod_base = OTHER; note = 2'-O-methyl modified nucleotide
  modified_base 73: mod_base = OTHER; note = 2'-O-methyl modified nucleotide
  modified_base 74: mod_base = OTHER; note = 2'-O-methyl modified nucleotide
  modified_base 75: mod_base = OTHER; note = 2'-O-methyl modified nucleotide
  modified_base 76: mod_base = OTHER; note = 2'-O-methyl modified nucleotide
  modified_base 77: mod_base = OTHER; note = 2'-O-methyl modified nucleotide
  modified_base 78: mod_base = OTHER; note = 2'-O-methyl modified nucleotide
  modified_base 79: mod_base = OTHER; note = 2'-O-methyl modified nucleotide
  modified_base 80: mod_base = OTHER; note = 2'-O-methyl modified nucleotide
  modified_base 81: mod_base = OTHER; note = 2'-O-methyl modified nucleotide
  modified_base 82: mod_base = OTHER; note = 2'-O-methyl modified nucleotide
  modified_base 83: mod_base = OTHER; note = 2'-O-methyl modified nucleotide
  modified_base 84: mod_base = OTHER; note = 2'-O-methyl modified nucleotide
  modified_base 85: mod_base = OTHER; note = 2'-O-methyl modified nucleotide
  modified_base 86: mod_base = OTHER; note = 2'-O-methyl modified nucleotide
  modified_base 87: mod_base = OTHER; note = 2'-O-methyl modified nucleotide
  modified_base 88: mod_base = OTHER; note = 2'-O-methyl modified nucleotide
  modified_base 89: mod_base = OTHER; note = 2'-O-methyl modified nucleotide
  modified_base 90: mod_base = OTHER; note = 2'-O-methyl modified nucleotide
  modified_base 91: mod_base = OTHER; note = 2'-O-methyl modified nucleotide
  modified_base 92: mod_base = OTHER; note = 2'-O-methyl modified nucleotide
  modified_base 93: mod_base = OTHER; note = 2'-O-methyl modified nucleotide
  modified_base 94: mod_base = OTHER; note = 2'-O-methyl modified nucleotide
  modified_base 95: mod_base = OTHER; note = 2'-O-methyl modified nucleotide
  modified_base 96: mod_base = OTHER; note = 2'-O-methyl modified nucleotide
  modified_base 123: mod_base = OTHER; note = Nucleotide with phosphorothioate linkage
  modified_base 124: mod_base = OTHER; note = 2'-O-methyl modified nucleotide with phosphorothioate linkage
  modified_base 125: mod_base = OTHER; note = 2'-O-methyl modified nucleotide with phosphorothioate linkage
  modified_base 126: mod_base = OTHER; note = 2'-O-methyl modified nucleotide

SEQ ID NO: 30432 - RNA, 128 nt, synthetic construct; identical to SEQ ID NO: 30424
  source 1..128: mol_type = other RNA
  modified_base 1: mod_base = OTHER; note = 2'-O-methyl modified nucleotide with phosphorothioate linkage
  modified_base 2: mod_base = OTHER; note = 2'-O-methyl modified nucleotide with phosphorothioate linkage
  modified_base 3: mod_base = OTHER; note = 2'-O-methyl modified nucleotide with phosphorothioate linkage
  modified_base 29: mod_base = OTHER; note = 2'-O-methyl modified nucleotide
  modified_base 30: mod_base = OTHER; note = 2'-O-methyl modified nucleotide
  modified_base 31: mod_base = OTHER; note = 2'-O-methyl modified nucleotide
  modified_base 32: mod_base = OTHER; note = 2'-O-methyl modified nucleotide
  modified_base 33: mod_base = OTHER; note = 2'-O-methyl modified nucleotide
  modified_base 34: mod_base = OTHER; note = 2'-O-methyl modified nucleotide
  modified_base 35: mod_base = OTHER; note = 2'-O-methyl modified nucleotide
  modified_base 36: mod_base = OTHER; note = 2'-O-methyl modified nucleotide
  modified_base 37: mod_base = OTHER; note = 2'-O-methyl modified nucleotide
  modified_base 38: mod_base = OTHER; note = 2'-O-methyl modified nucleotide
  modified_base 39: mod_base = OTHER; note = 2'-O-methyl modified nucleotide
  modified_base 40: mod_base = OTHER; note = 2'-O-methyl modified nucleotide
  modified_base 69: mod_base = OTHER; note = 2'-O-methyl modified nucleotide
  modified_base 70: mod_base = OTHER; note = 2'-O-methyl modified nucleotide
  modified_base 71: mod_base = OTHER; note = 2'-O-methyl modified nucleotide
  modified_base 72: mod_base = OTHER; note = 2'-O-methyl modified nucleotide
  modified_base 73: mod_base = OTHER; note = 2'-O-methyl modified nucleotide
  modified_base 74: mod_base = OTHER; note = 2'-O-methyl modified nucleotide
  modified_base 75: mod_base = OTHER; note = 2'-O-methyl modified nucleotide
  modified_base 76: mod_base = OTHER; note = 2'-O-methyl modified nucleotide
  modified_base 77: mod_base = OTHER; note = 2'-O-methyl modified nucleotide
  modified_base 78: mod_base = OTHER; note = 2'-O-methyl modified nucleotide
  modified_base 79: mod_base = OTHER; note = 2'-O-methyl modified nucleotide
  modified_base 80: mod_base = OTHER; note = 2'-O-methyl modified nucleotide
  modified_base 81: mod_base = OTHER; note = 2'-O-methyl modified nucleotide
  modified_base 82: mod_base = OTHER; note = 2'-O-methyl modified nucleotide
  modified_base 83: mod_base = OTHER; note = 2'-O-methyl modified nucleotide
  modified_base 84: mod_base = OTHER; note = 2'-O-methyl modified nucleotide
  modified_base 85: mod_base = OTHER; note = 2'-O-methyl modified nucleotide
  modified_base 86: mod_base = OTHER; note = 2'-O-methyl modified nucleotide
  modified_base 87: mod_base = OTHER; note = 2'-O-methyl modified nucleotide
  modified_base 88: mod_base = OTHER; note = 2'-O-methyl modified nucleotide
  modified_base 89: mod_base = OTHER; note = 2'-O-methyl modified nucleotide
  modified_base 90: mod_base = OTHER; note = 2'-O-methyl modified nucleotide
  modified_base 91: mod_base = OTHER; note = 2'-O-methyl modified nucleotide
  modified_base 92: mod_base = OTHER; note = 2'-O-methyl modified nucleotide
  modified_base 93: mod_base = OTHER; note = 2'-O-methyl modified nucleotide
  modified_base 94: mod_base = OTHER; note = 2'-O-methyl modified nucleotide
  modified_base 95: mod_base = OTHER; note = 2'-O-methyl modified nucleotide
  modified_base 96: mod_base = OTHER; note = 2'-O-methyl modified nucleotide
  modified_base 125: mod_base = OTHER; note = Nucleotide with phosphorothioate linkage
  modified_base 126: mod_base = OTHER; note = 2'-O-methyl modified nucleotide with phosphorothioate linkage
  modified_base 127: mod_base = OTHER; note = 2'-O-methyl modified nucleotide with phosphorothioate linkage
  modified_base 128: mod_base = OTHER; note = 2'-O-methyl modified nucleotide

SEQ ID NO: 30433 - RNA, 6369 nt, synthetic construct
  source 1..6369: mol_type = other RNA
atgcctgcggctaagcgggtaaaattggatggtggggacaagaagtacagcatcggcctggacatcggcaccaactctgtgggctgggccgtgatcaccgacgagtacaaggtgcccagcaagaaattcaaggtgctgggcaacaccgaccggcacagcatcaagaagaacctgatcggagccctgctgttcgacagcggcgaaacagccgaggccacccggctgaagagaaccgccagaagaagatacaccagacggaagaaccggatctgctatctgcaagagatcttcagcaacgagatggccaaggtggacgacagcttcttccacagactggaagagtccttcctggtggaagaggataagaagcacgagcggcaccccatcttcggcaacatcgtggacgaggtggcctaccacgagaagtaccccaccatctaccacctgagaaagaaactggtggacagcaccgacaaggccgacctgcggctgatctatctggccctggcccacatgatcaagttccggggccacttcctgatcgagggcgacctgaaccccgacaacagcgacgtggacaagctgttcatccagctggtgcagacctacaaccagctgttcgaggaaaaccccatcaacgccagcggcgtggacgccaaggccatcctgtctgccagactgagcaagagcagacggctggaaaatctgatcgcccagctgcccggcgagaagaagaatggcctgttcggaaacctgattgccctgagcctgggcctgacccccaacttcaagagcaacttcgacctggccgaggatgccaaactgcagctgagcaaggacacctacgacgacgacctggacaacctgctggcccagatcggcgaccagtacgccgacctgtttctggccgccaagaacctgtccgacgccatcctgctgagcgacatcctgagagtgaacaccgagatcaccaaggcccccctgagcgcctctatgatcaagagatacgacgagcaccaccaggacctgaccctgctgaaagctctcgtgcggcagcagctgcctgagaagtacaaagagattttcttcgaccagagcaagaacggctacgccggctacattgacggcggagccagccaggaagagttctacaagttcatcaagcccatcctggaaaagatggacggcaccgaggaactgctcgtgaagctgaacagagaggacctgctgcggaagcagcggaccttcgacaacggcagcatcccccaccagatccacctgggagagctgcacgccattctgcggcggcaggaagatttttacccattcctgaaggacaaccgggaaaagatcgagaagatcctgaccttccgcatcccctactacgtgggccctctggccaggggaaacagcagattcgcctggatgaccagaaagagcgaggaaaccatcaccccctggaacttcgaggaagtggtggacaagggcgcttccgcccagagcttcatcgagcggatgaccaacttcgataagaacctgcccaacgagaaggtgctgcccaagcacagcctgctgtacgagtacttcaccgtgtataacgagctgaccaaagtgaaatacgtgaccgagggaatgagaaagcccgccttcctgagcggcgagcagaaaaaggccatcgtggacctgctgttcaagaccaaccggaaagtgaccgtgaagcagctgaaagaggactacttcaagaaaatcgagtgcttcgactccgtggaaatctccggcgtggaagatcggttcaacgcctccctgggcacataccacgatctgctgaaaattatcaaggacaaggacttcctggacaatgaggaaaacgaggacattctggaagatatcgtgctgaccctgacactgtttgaggacagagagatgatcgaggaacggctgaaaacctatgcccacctgttcgacgacaaagtgatgaagcagctgaagcggcggagatacaccggctggggcaggctgagccggaagctgatcaacggcatccgggacaagcagtccggcaagacaatcctggatttcctgaagtccgacggcttcgccaacagaaacttcatgcagctgatccacgacgacagcctgacctttaaagaggacatccagaaagcccaggtgtccggccagggcgatagcctgcacgagcacattgccaatctggccggcagccccgccattaagaagggcatcctgcagacagtgaaggtggtggacgagctcgtgaaagtgatgggccggcacaagcccgagaacatcgtgatcgaaatggccagagagaaccagaccacccagaagggacagaagaacagccgcgagagaatgaagcggatcgaagagggcatcaaagagctgggcagccagatcctgaaagaacaccccgtggaaaacacccagctgcagaacgagaagctgtacctgtactacctgcagaatgggcgggatatgtacgtggaccaggaactggacatcaaccggctgtccgactacgatgtggaccatatcgtgcctcagagctttctgaaggacgactccatcgacaacaaggtgctgaccagaagcgacaagaatcggggcaagagcgacaacgtgccctccgaagaggtcgtgaagaagatgaagaactactggcggcagctgctgaacgccaagctgattacccagagaaagttcgacaatctgaccaaggccgagagaggcggcctgagcgaactggataaggccggcttcatcaagagacagctggtggaaacccggcagatcacaaagcacgtggcacagatcctggactcccggatgaacactaagtacgacgagaatgacaagctgatccgggaagtgaaagtgatcaccctgaagtccaagctggtgtccgatttccggaaggatttccagttttacaaagtgcgcgagatcaacaactaccaccacgcccacgacgcctacctgaacgccgtcgtgggaaccgccctgatcaaaaagtaccctaagctggaaagcgagttcgtgtacggcgactacaaggtgtacgacgtgcggaagatgatcgccaagagcgagcaggaaatcggcaaggctaccgccaagtacttcttctacagcaacatcatgaactttttcaagaccgagattaccctggccaacggcgagatccggaagcggcctctgatcgagacaaacggcgaaaccggggagatcgtgtgggataagggccgggattttgccaccgtgcggaaagtgctgagcatgccccaagtgaatatcgtgaaaaagaccgaggtgcagacaggcggcttcagcaaagagtctatcctgcccaagaggaacagcgataagctgatcgccagaaagaaggactgggaccctaagaagtacggcggcttcgacagccccaccgtggcctattctgtgctggtggtggccaaagtggaaaagggcaagtccaagaaactgaagagtgtgaaagagctgctggggatcaccatcatggaaagaagcagcttcgagaagaatcccatcgactttctggaagccaagggctacaaagaagtgaaaaaggacctgatcatcaagctgcctaagtactccctgttcgagctggaaaacggccggaagagaatgctggcctctgccggcgaactgcagaagggaaacgaactggccctgccctccaaatatgtgaacttcctgtacctggccagccactatgagaagctgaagggctcccccgaggataatgagcagaaacagctgtttgtggaacagcacaagcactacctggacgagatcatcgagcagatcagcgagttctccaagagagtgatcctggccgacgctaatctggacaaagtgctgtccgcctacaacaagcaccgggataagcccatcagagagcaggccgagaatatcatccacctgtttaccctgaccaatctgggagcccctgccgccttcaagtactttgacaccaccatcgaccggaagaggtacaccagcaccaaagaggtgctggacgccaccctgatccaccagagcatcaccggcctgtacgagacacggatcgacctgtctcagctgggaggtgactctggaggatctagcggaggatcctctggcagcgagacaccaggaacaagcgagtcagcaacaccagagagcagtggcggcagcagcggcggcagcagcaccctaaatatagaagatgagtatcggctacatgagacctcaaaagagccagatgtttctctagggtccacatggctgtctgattttcctcaggcctgggcggaaaccgggggcatgggactggcagttcgccaagctcctctgatcatacctctgaaagcaacctctacccccgtgtccataaaacaataccccatgtcacaagaagccagactggggatcaagccccacatacagagactgttggaccagggaatactggtaccctgccagtccccctggaacacgcccctgctacccgttaagaaaccagggactaatgattataggcctgtccaggatctgagagaagtcaacaagcgggtggaggacatccaccccaccgtgcccaacccttacaacctcttgagcgggctcccaccgtcccaccagtggtacactgtgcttgatttaaaggatgcctttttctgcctgagactccaccccaccagtcagcctctcttcgcctttgagtggagagatccagagatgggaatctcaggacaattgacctggaccagactcccacagggtttcaaaaacagtcccaccctgtttaatgaggcactgcacagagacctagcagacttccggatccagcacccagacttgatcctgctacagtacgtggatgacttactgctggccgccacttctgagctagactgccaacaaggtactcgggccctgttacaaaccctagggaacctcgggtatcgggcctcggccaagaaagcccaaatttgccagaaacaggtcaagtatctggggtatcttctaaaagagggtcagagatggctgactgaggccagaaaagagactgtgatggggcagcctactccgaagacccctcgacaactaagggagttcctagggaaggcaggcttctgtcgcctcttcatccctgggtttgcagaaatggcagcccccctgtaccctctcaccaaaccggggactctgtttaattggggcccagaccaacaaaaggcctatcaagaaatcaagcaagcccttctaactgccccagccctggggttgccagatttgactaagccctttgaactctttgtcgacgagaagcagggctacgccaaaggtgtcctaacgcaaaaactgggaccttggcgtcggccggtggcctacctgtccaaaaagctagacccagtagcagctgggtggcccccttgcctacggatggtagcagccattgccgtactgacaaaggatgcaggcaagctaaccatgggacagccactagtcattctggccccccatgcagtagaggcactagtcaaacaaccccccgaccgctggctttccaacgcccggatgactcactatcaggccttgcttttggacacggaccgggtccagttcggaccggtggtagccctgaacccggctacgctgctcccactgcctgaggaagggctgcaacacaactgccttgatatcctggccgaagcccacggaacccgacccgacctaacggaccagccgctcccagacgccgaccacacctggtacacggatggaagcagtctcttacaagagggacagcgtaaggcgggagctgcggtgaccaccgagaccgaggtaatctgggctaaagccctgccagccgggacatccgctcagcgggctgaactgatagcactcacccaggccctaaagatggcagaaggtaagaagctaaatgtttatactgatagccgttatgcttttgctactgcccatatccatggagaaatatacagaaggcgtgggtggctcacatcagaaggcaaagagatcaaaaataaagacgagatcttggccctactaaaagccctctttctgcccaaaagacttagcataatccattgtccaggacatcaaaagggacacagcgccgaggctagaggcaaccggatggctgaccaagcggcccgaaaggcagccatcacagagactccagacacctctaccctcctcatagaaaattcatcaccctctggcggctcaaaaagaaccgccgacggcagcgaattcgagaaaaggacggcggatggtagcgaattcgagagccctaaaaagaaggccaaggtagagtaa

SEQ ID NO: 30434 - RNA, 100 nt, synthetic construct
  source 1..100: mol_type = other RNA
  modified_base 1: mod_base = OTHER; note = 2'-O-methyl modified nucleotide with phosphorothioate linkage
  modified_base 2: mod_base = OTHER; note = 2'-O-methyl modified nucleotide with phosphorothioate linkage
  modified_base 3: mod_base = OTHER; note = 2'-O-methyl modified nucleotide with phosphorothioate linkage
  modified_base 29: mod_base = OTHER; note = 2'-O-methyl modified nucleotide
  modified_base 30: mod_base = OTHER; note = 2'-O-methyl modified nucleotide
  modified_base 31: mod_base = OTHER; note = 2'-O-methyl modified nucleotide
  modified_base 32: mod_base = OTHER; note = 2'-O-methyl modified nucleotide
  modified_base 33: mod_base = OTHER; note = 2'-O-methyl modified nucleotide
  modified_base 34: mod_base = OTHER; note = 2'-O-methyl modified nucleotide
  modified_base 35: mod_base = OTHER; note = 2'-O-methyl modified nucleotide
  modified_base 36: mod_base = OTHER; note = 2'-O-methyl modified nucleotide
  modified_base 37: mod_base = OTHER; note = 2'-O-methyl modified nucleotide
  modified_base 38: mod_base = OTHER; note = 2'-O-methyl modified nucleotide
  modified_base 39: mod_base = OTHER; note = 2'-O-methyl modified nucleotide
  modified_base 40: mod_base = OTHER; note = 2'-O-methyl modified nucleotide
  modified_base 69: mod_base = OTHER; note = 2'-O-methyl modified nucleotide
  modified_base 70: mod_base = OTHER; note = 2'-O-methyl modified nucleotide
  modified_base 71: mod_base = OTHER; note = 2'-O-methyl modified nucleotide
  modified_base 72: mod_base = OTHER; note = 2'-O-methyl modified nucleotide
  modified_base 73: mod_base = OTHER; note = 2'-O-methyl modified nucleotide
  modified_base 74: mod_base = OTHER; note = 2'-O-methyl modified nucleotide
  modified_base 75: mod_base = OTHER; note = 2'-O-methyl modified nucleotide
  modified_base 76: mod_base = OTHER; note = 2'-O-methyl modified nucleotide
  modified_base 77: mod_base = OTHER; note = 2'-O-methyl modified nucleotide
  modified_base 78: mod_base = OTHER; note = 2'-O-methyl modified nucleotide
  modified_base 79: mod_base = OTHER; note = 2'-O-methyl modified nucleotide
  modified_base 80: mod_base = OTHER; note = 2'-O-methyl modified nucleotide
  modified_base 81: mod_base = OTHER; note = 2'-O-methyl modified nucleotide
  modified_base 82: mod_base = OTHER; note = 2'-O-methyl modified nucleotide
  modified_base 83: mod_base = OTHER; note = 2'-O-methyl modified nucleotide
  modified_base 84: mod_base = OTHER; note = 2'-O-methyl modified nucleotide
  modified_base 85: mod_base = OTHER; note = 2'-O-methyl modified nucleotide
  modified_base 86: mod_base = OTHER; note = 2'-O-methyl modified nucleotide
  modified_base 87: mod_base = OTHER; note = 2'-O-methyl modified nucleotide
  modified_base 88: mod_base = OTHER; note = 2'-O-methyl modified nucleotide
  modified_base 89: mod_base = OTHER; note = 2'-O-methyl modified nucleotide
  modified_base 90: mod_base = OTHER; note = 2'-O-methyl modified nucleotide
  modified_base 91: mod_base = OTHER; note = 2'-O-methyl modified nucleotide
  modified_base 92: mod_base = OTHER; note = 2'-O-methyl modified nucleotide
  modified_base 93: mod_base = OTHER; note = 2'-O-methyl modified nucleotide
  modified_base 94: mod_base = OTHER; note = 2'-O-methyl modified nucleotide
  modified_base 95: mod_base = OTHER; note = 2'-O-methyl modified nucleotide
  modified_base 96: mod_base = OTHER; note = 2'-O-methyl modified nucleotide
  modified_base 97: mod_base = OTHER; note = 2'-O-methyl modified nucleotide with phosphorothioate linkage
  modified_base 98: mod_base = OTHER; note = 2'-O-methyl modified nucleotide with phosphorothioate linkage
  modified_base 99: mod_base = OTHER; note = 2'-O-methyl modified nucleotide with phosphorothioate linkage
  modified_base 100: mod_base = OTHER; note = 2'-O-methyl modified nucleotide
acacaaataccagtccagcggttttagagctagaaatagcaagttaaaataaggctagtccgttatcaacttgaaaaagtggcaccgagtcggtgctttt

SEQ ID NO: 30435 - RNA, 6369 nt, synthetic construct; identical to SEQ ID NO: 30433
  source 1..6369: mol_type = other RNA

SEQ ID NO: 30436 - RNA, 100 nt, synthetic construct; identical to SEQ ID NO: 30434
  source 1..100: mol_type = other RNA
  modified_base 1: mod_base = OTHER; note = 2'-O-methyl modified nucleotide with phosphorothioate linkage
  modified_base 2: mod_base = OTHER; note = 2'-O-methyl modified nucleotide with phosphorothioate linkage
  modified_base 3: mod_base = OTHER; note = 2'-O-methyl modified nucleotide with phosphorothioate linkage
  modified_base 29: mod_base = OTHER; note = 2'-O-methyl modified nucleotide
  modified_base 30: mod_base = OTHER; note = 2'-O-methyl modified nucleotide
  modified_base 31: mod_base = OTHER; note = 2'-O-methyl modified nucleotide
  modified_base 32: mod_base = OTHER; note = 2'-O-methyl modified nucleotide
  modified_base 33: mod_base = OTHER; note = 2'-O-methyl modified nucleotide
  modified_base 34: mod_base = OTHER; note = 2'-O-methyl modified nucleotide
  modified_base 35: mod_base = OTHER; note = 2'-O-methyl modified nucleotide
  modified_base 36: mod_base = OTHER; note = 2'-O-methyl modified nucleotide
  modified_base 37: mod_base = OTHER; note = 2'-O-methyl modified nucleotide
  modified_base 38: mod_base = OTHER; note = 2'-O-methyl modified nucleotide
  modified_base 39: mod_base = OTHER; note = 2'-O-methyl modified nucleotide
  modified_base 40: mod_base = OTHER; note = 2'-O-methyl modified nucleotide
  modified_base 69: mod_base = OTHER; note = 2'-O-methyl modified nucleotide
  modified_base 70: mod_base = OTHER; note = 2'-O-methyl modified nucleotide
  modified_base 71: mod_base = OTHER; note = 2'-O-methyl modified nucleotide
  modified_base 72: mod_base = OTHER; note = 2'-O-methyl modified nucleotide
  modified_base 73: mod_base = OTHER; note = 2'-O-methyl modified nucleotide
  modified_base 74: mod_base = OTHER; note = 2'-O-methyl modified nucleotide
  modified_base 75: mod_base = OTHER; note = 2'-O-methyl modified nucleotide
  modified_base 76: mod_base = OTHER; note = 2'-O-methyl modified nucleotide
  modified_base 77: mod_base = OTHER; note = 2'-O-methyl modified nucleotide
  modified_base 78: mod_base = OTHER; note = 2'-O-methyl modified nucleotide
  modified_base 79: mod_base = OTHER; note = 2'-O-methyl modified nucleotide
  modified_base 80: mod_base = OTHER; note = 2'-O-methyl modified nucleotide
  modified_base 81: mod_base = OTHER; note = 2'-O-methyl modified nucleotide
  modified_base 82: mod_base = OTHER; note = 2'-O-methyl modified nucleotide
  modified_base 83: mod_base = OTHER; note = 2'-O-methyl modified nucleotide
  modified_base 84: mod_base = OTHER; note = 2'-O-methyl modified nucleotide
  modified_base 85: mod_base = OTHER; note = 2'-O-methyl modified nucleotide
  modified_base 86: mod_base = OTHER; note = 2'-O-methyl modified nucleotide
  modified_base 87: mod_base = OTHER; note = 2'-O-methyl modified nucleotide
  modified_base 88: mod_base = OTHER; note = 2'-O-methyl modified nucleotide
  modified_base 89: mod_base = OTHER; note = 2'-O-methyl modified nucleotide
  modified_base 90: mod_base = OTHER; note = 2'-O-methyl modified nucleotide
  modified_base 91: mod_base = OTHER; note = 2'-O-methyl modified nucleotide
  modified_base 92: mod_base = OTHER; note = 2'-O-methyl modified nucleotide
  modified_base 93: mod_base = OTHER; note = 2'-O-methyl modified nucleotide
  modified_base 94: mod_base = OTHER; note = 2'-O-methyl modified nucleotide
  modified_base 95: mod_base = OTHER; note = 2'-O-methyl modified nucleotide
  modified_base 96: mod_base = OTHER; note = 2'-O-methyl modified nucleotide
  modified_base 97: mod_base = OTHER; note = 2'-O-methyl modified nucleotide with phosphorothioate linkage
  modified_base 98: mod_base = OTHER; note = 2'-O-methyl modified nucleotide with phosphorothioate linkage
  modified_base 99: mod_base = OTHER; note = 2'-O-methyl modified nucleotide with phosphorothioate linkage
  modified_base 100: mod_base = OTHER; note = 2'-O-methyl modified nucleotide

SEQ ID NO: 30437-37634 - skipped (7198 entries)

SEQ ID NO: 37635 - protein, 4 aa, unidentified
YADD

SEQ ID NO: 37636 - protein, 4 aa, unidentified
YMDD

SEQ ID NO: 37637 - protein, 4 aa, unidentified
YVDD

SEQ ID NO: 37638 - protein, 9 aa, unidentified
LAGLIDADG

SEQ ID NO: 37639 - protein, 6 aa, synthetic construct
IENSSP

SEQ ID NO: 37640 - RNA, 100 nt, synthetic construct
  source 1..100: mol_type = other RNA
  misc_difference 1..100: note = This sequence may encompass 5, 10, 20, 30, 50, 70 or 100 nucleotides
aaaaaaaaaaaaaaaaaaaaaaaaaaaaaaaaaaaaaaaaaaaaaaaaaaaaaaaaaaaaaaaaaaaaaaaaaaaaaaaaaaaaaaaaaaaaaaaaaaaa

SEQ ID NO: 37641 - RNA, 20 nt, synthetic construct
  source 1..20: mol_type = other RNA
acacaaataccagtccagcg

SEQ ID NO: 37642 - protein, 2129 aa, synthetic construct
MPAAKRVKLDGGDKKYSIGLDIGTNSVGWAVITDEYKVPSKKFKVLGNTDRHSIKKNLIGALLFDSGETAEATRLKRTARRRYTRRKNRICYLQEIFSNEMAKVDDSFFHRLEESFLVEEDKKHERHPIFGNIVDEVAYHEKYPTIYHLRKKLVDSTDKADLRLIYLALAHMIKFRGHFLIEGDLNPDNSDVDKLFIQLVQTYNQLFEENPINASGVDAKAILSARLSKSRRLENLIAQLPGEKKNGLFGNLIALSLGLTPNFKSNFDLAEDAKLQLSKDTYDDDLDNLLAQIGDQYADLFLAAKNLSDAILLSDILRVNTEITKAPLSASMIKRYDEHHQDLTLLKALVRQQLPEKYKEIFFDQSKNGYAGYIDGGASQEEFYKFIKPILEKMDGTEELLVKLNREDLLRKQRTFDNGSIPHQIHLGELHAILRRQEDFYPFLKDNREKIEKILTFRIPYYVGPLARGNSRFAWMTRKSEETITPWNFEEVVDKGASAQSFIERMTNFDKNLPNEKVLPKHSLLYEYFTVYNELTKVKYVTEGMRKPAFLSGEQKKAIVDLLFKTNRKVTVKQLKEDYFKKIECFDSVEISGVEDRFNASLGTYHDLLKIIKDKDFLDNEENEDILEDIVLTLTLFEDREMIEERLKTYAHLFDDKVMKQLKRRRYTGWGRLSRKLINGIRDKQSGKTILDFLKSDGFANRNFMQLIHDDSLTFKEDIQKAQVSGQGDSLHEHIANLAGSPAIKKGILQTVKVVDELVKVMGRHKPENIVIEMARENQTTQKGQKNSRERMKRIEEGIKELGSQILKEHPVENTQLQNEKLYLYYLQNGRDMYVDQELDINRLSDYDVDHIVPQSFLKDDSIDNKVLTRSDKARGKSDNVPSEEVVKKMKNYWRQLLNAKLITQRKFDNLTKAERGGLSELDKAGFIKRQLVETRQITKHVAQILDSRMNTKYDENDKLIREVKVITLKSKLVSDFRKDFQFYKVREINNYHHAHDAYLNAVVGTALIKKYPKLESEFVYGDYKVYDVRKMIAKSEQEIGKATAKYFFYSNIMNFFKTEITLANGEIRKRPLIETNGETGEIVWDKGRDFATVRKVLSMPQVNIVKKTEVQTGGFSKESILPKRNSDKLIARKKDWDPKKYGGFDSPTVAYSVLVVAKVEKGKSKKLKSVKELLGITIMERSSFEKNPIDFLEAKGYKEVKKDLIIKLPKYSLFELENGRKRMLASAGELQKGNELALPSKYVNFLYLASHYEKLKGSPEDNEQKQLFVEQHKHYLDEIIEQISEFSKRVILADANLDKVLSAYNKHRDKPIREQAENIIHLFTLTNLGAPAAFKYFDTTIDRKRYTSTKEVLDATLIHQSITGLYETRIDLSQLGGDGGAEAAAKEAAAKEAAAKEAAAKALEAEAAAKEAAAKEAAAKEAAAKAGGVLNLEEEYRLHEKPVPSSIDPSWLQLFPTVWAERAGMGLANQVPPVVVELRSGASPVAVRQYPMSKEAREGIRPHIQRFLDLGVLVPCQSPWNTPLLPVKKPGTNDYRPVQDLREINKRVQDIHPTVPNPYNLLSSLPPSHTWYSVLDLKDAFFCLKLHPNSQPLFAFEWRDPEKGNTGQLTWTRLPQGFKNSPTLFNEALHRDLAPFRALNPQVVLLQYVDDLLVAAPTYRDCKEGTQKLLQELSKLGYRVSAKKAQLCQKEVTYLGYLLKEGKRWLTPARKATVMKIPPPTTPRQVREFLGTAGFCRLWIPGFASLAAPLYPLTKPSIPFIWTEEHQKAFDRIKEALLSAPALALPDLTKPFTLYVDERAGVARGVLTQTLGPWRRPVAYLSKKLDPVASGWPTCLKAVAAVALLLKDADKLTLGQNVTVIASHSLESIVRQPPDRWMTNARMTHYQSLLLNERVSFAPPAVLNPATLLPVESEATPVHRCSEILAEETGTRRDLKDQPLPGVPAWYTDGSSFIAEGKRRAGAAIVDGKRTVWASSLPEGTSAQKAELVALTQALRLAEGKDINIYTDSRYAFATAHIHGAIYKQRGWLTSAGKDIKNKEEILALLEAIHLPKRVAIIHCPGHQKGNDPVATGNRRADEAAKQAALSTRVLAETTKPAGKRTADGSEFEKRTADGSEFESPKKKAKVE

SEQ ID NO: 37643 - protein, 2089 aa, synthetic construct
MPAAKRVKLDGGDKKYSIGLDIGTNSVGWAVITDEYKVPSKKFKVLGNTDRHSIKKNLIGALLFDSGETAEATRLKRTARRRYTRRKNRICYLQEIFSNEMAKVDDSFFHRLEESFLVEEDKKHERHPIFGNIVDEVAYHEKYPTIYHLRKKLVDSTDKADLRLIYLALAHMIKFRGHFLIEGDLNPDNSDVDKLFIQLVQTYNQLFEENPINASGVDAKAILSARLSKSRRLENLIAQLPGEKKNGLFGNLIALSLGLTPNFKSNFDLAEDAKLQLSKDTYDDDLDNLLAQIGDQYADLFLAAKNLSDAILLSDILRVNTEITKAPLSASMIKRYDEHHQDLTLLKALVRQQLPEKYKEIFFDQSKNGYAGYIDGGASQEEFYKFIKPILEKMDGTEELLVKLNREDLLRKQRTFDNGSIPHQIHLGELHAILRRQEDFYPFLKDNREKIEKILTFRIPYYVGPLARGNSRFAWMTRKSEETITPWNFEEVVDKGASAQSFIERMTNFDKNLPNEKVLPKHSLLYEYFTVYNELTKVKYVTEGMRKPAFLSGEQKKAIVDLLFKTNRKVTVKQLKEDYFKKIECFDSVEISGVEDRFNASLGTYHDLLKIIKDKDFLDNEENEDILEDIVLTLTLFEDREMIEERLKTYAHLFDDKVMKQLKRRRYTGWGRLSRKLINGIRDKQSGKTILDFLKSDGFANRNFMQLIHDDSLTFKEDIQKAQVSGQGDSLHEHIANLAGSPAIKKGILQTVKVVDELVKVMGRHKPENIVIEMARENQTTQKGQKNSRERMKRIEEGIKELGSQILKEHPVENTQLQNEKLYLYYLQNGRDMYVDQELDINRLSDYDVDHIVPQSFLKDDSIDNKVLTRSDKARGKSDNVPSEEVVKKMKNYWRQLLNAKLITQRKFDNLTKAERGGLSELDKAGFIKRQLVETRQITKHVAQILDSRMNTKYDENDKLIREVKVITLKSKLVSDFRKDFQFYKVREINNYHHAHDAYLNAVVGTALIKKYPKLESEFVYGDYKVYDVRKMIAKSEQEIGKATAKYFFYSNIMNFFKTEITLANGEIRKRPLIETNGETGEIVWDKGRDFATVRKVLSMPQVNIVKKTEVQTGGFSKESILPKRNSDKLIARKKDWDPKKYGGFDSPTVAYSVLVVAKVEKGKSKKLKSVKELLGITIMERSSFEKNPIDFLEAKGYKEVKKDLIIKLPKYSLFELENGRKRMLASAGELQKGNELALPSKYVNFLYLASHYEKLKGSPEDNEQKQLFVEQHKHYLDEIIEQISEFSKRVILADANLDKVLSAYNKHRDKPIREQAENIIHLFTLTNLGAPAAFKYFDTTIDRKRYTSTKEVLDATLIHQSITGLYETRIDLSQLGGDGGGGGGGGGGVLNLEEEYRLHEKPVPSSIDPSWLQLFPTVWAERAGMGLANQVPPVVVELRSGASPVAVRQYPMSKEAREGIRPHIQRFLDLGVLVPCQSPWNTPLLPVKKPGTNDYRPVQDLREINKRVQDIHPTVPNPYNLLSSLPPSHTWYSVLDLKDAFFCLKLHPNSQPLFAFEWRDPEKGNTGQLTWTRLPQGFKNSPTLFNEALHRDLAPFRALNPQVVLLQYVDDLLVAAPTYRDCKEGTQKLLQELSKLGYRVSAKKAQLCQKEVTYLGYLLKEGKRWLTPARKATVMKIPPPTTPRQVREFLGTAGFCRLWIPGFASLAAPLYPLTKPSIPFIWTEEHQKAFDRIKEALLSAPALALPDLTKPFTLYVDERAGVARGVLTQTLGPWRRPVAYLSKKLDPVASGWPTCLKAVAAVALLLKDADKLTLGQNVTVIASHSLESIVRQPPDRWMTNARMTHYQSLLLNERVSFAPPAVLNPATLLPVESEATPVHRCSEILAEETGTRRDLKDQPLPGVPAWYTDGSSFIAEGKRRAGAAIVDGKRTVWASSLPEGTSAQKAELVALTQALRLAEGKDINIYTDSRYAFATAHIHGAIYKQRGWLTSAGKDIKNKEEILALLEAIHLPKRVAIIHCPGHQKGNDPVATGNRRADEAAKQAALSTRVLAETTKPAGKRTADGSEFEKRTADGSEFESPKKKAKVE

SEQ ID NO: 37644 - protein, 2099 aa, synthetic construct
MPAAKRVKLDGGDKKYSIGLDIGTNSVGWAVITDEYKVPSKKFKVLGNTDRHSIKKNLIGALLFDSGETAEATRLKRTARRRYTRRKNRICYLQEIFSNEMAKVDDSFFHRLEESFLVEEDKKHERHPIFGNIVDEVAYHEKYPTIYHLRKKLVDSTDKADLRLIYLALAHMIKFRGHFLIEGDLNPDNSDVDKLFIQLVQTYNQLFEENPINASGVDAKAILSARLSKSRRLENLIAQLPGEKKNGLFGNLIALSLGLTPNFKSNFDLAEDAKLQLSKDTYDDDLDNLLAQIGDQYADLFLAAKNLSDAILLSDILRVNTEITKAPLSASMIKRYDEHHQDLTLLKALVRQQLPEKYKEIFFDQSKNGYAGYIDGGASQEEFYKFIKPILEKMDGTEELLVKLNREDLLRKQRTFDNGSIPHQIHLGELHAILRRQEDFYPFLKDNREKIEKILTFRIPYYVGPLARGNSRFAWMTRKSEETITPWNFEEVVDKGASAQSFIERMTNFDKNLPNEKVLPKHSLLYEYFTVYNELTKVKYVTEGMRKPAFLSGEQKKAIVDLLFKTNRKVTVKQLKEDYFKKIECFDSVEISGVEDRFNASLGTYHDLLKIIKDKDFLDNEENEDILEDIVLTLTLFEDREMIEERLKTYAHLFDDKVMKQLKRRRYTGWGRLSRKLINGIRDKQSGKTILDFLKSDGFANRNFMQLIHDDSLTFKEDIQKAQVSGQGDSLHEHIANLAGSPAIKKGILQTVKVVDELVKVMGRHKPENIVIEMARENQTTQKGQKNSRERMKRIEEGIKELGSQILKEHPVENTQLQNEKLYLYYLQNGRDMYVDQELDINRLSDYDVDHIVPQSFLKDDSIDNKVLTRSDKARGKSDNVPSEEVVKKMKNYWRQLLNAKLITQRKFDNLTKAERGGLSELDKAGFIKRQLVETRQITKHVAQILDSRMNTKYDENDKLIREVKVITLKSKLVSDFRKDFQFYKVREINNYHHAHDAYLNAVVGTALIKKYPKLESEFVYGDYKVYDVRKMIAKSEQEIGKATAKYFFYSNIMNFFKTEITLANGEIRKRPLIETNGETGEIVWDKGRDFATVRKVLSMPQVNIVKKTEVQTGGFSKESILPKRNSDKLIARKKDWDPKKYGGFDSPTVAYSVLVVAKVEKGKSKKLKSVKELLGITIMERSSFEKNPIDFLEAKGYKEVKKDLIIKLPKYSLFELENGRKRMLASAGELQKGNELALPSKYVNFLYLASHYEKLKGSPEDNEQKQLFVEQHKHYLDEIIEQISEFSKRVILADANLDKVLSAYNKHRDKPIREQAENIIHLFTLTNLGAPAAFKYFDTTIDRKRYTSTKEVLDATLIHQSITGLYETRIDLSQLGGDGGSGSETPGTSESATPESGGVLNLEEEYRLHEKPVPSSIDPSWLQLFPTVWAERAGMGLANQVPPVVVELRSGASPVAVRQYPMSKEAREGIRPHIQRFLDLGVLVPCQSPWNTPLLPVKKPGTNDYRPVQDLREINKRVQDIHPTVPNPYNLLSSLPPSHTWYSVLDLKDAFFCLKLHPNSQPLFAFEWRDPEKGNTGQLTWTRLPQGFKNSPTLFNEALHRDLAPFRALNPQVVLLQYVDDLLVAAPTYRDCKEGTQKLLQELSKLGYRVSAKKAQLCQKEVTYLGYLLKEGKRWLTPARKATVMKIPPPTTPRQVREFLGTAGFCRLWIPGFASLAAPLYPLTKPSIPFIWTEEHQKAFDRIKEALLSAPALALPDLTKPFTLYVDERAGVARGVLTQTLGPWRRPVAYLSKKLDPVASGWPTCLKAVAAVALLLKDADKLTLGQNVTVIASHSLESIVRQPPDRWMTNARMTHYQSLLLNERVSFAPPAVLNPATLLPVESEATPVHRCSEILAEETGTRRDLKDQPLPGVPAWYTDGSSFIAEGKRRAGAAIVDGKRTVWASSLPEGTSAQKAELVALTQALRLAEGKDINIYTDSRYAFATAHIHGAIYKQRGWLTSAGKDIKNKEEILALLEAIHLPKRVAIIHCPGHQKGNDPVATGNRRADEAAKQAALSTRVLAETTKPAGKRTADGSEFEKRTADGSEFESPKKKAKVE

SEQ ID NO: 37645 - protein, 6 aa, synthetic construct
GGGGSS

SEQ ID NO: 37646 - protein, 5 aa, synthetic construct
PAPAP

SEQ ID NO: 37647 - protein, 6 aa, synthetic construct
PAPGGG

SEQ ID NO: 37648 - protein, 11 aa, synthetic construct
EAAAKGGGGSS

SEQ ID NO: 37649 - protein, 11 aa, synthetic construct
PAPAPAPAPAP

SEQ ID NO: 37650 - protein, 6 aa, synthetic construct
GGGPAP

SEQ ID NO: 37651 - protein, 9 aa, synthetic construct
GSSGGSGGG

SEQ ID NO: 37652 - protein, 11 aa, synthetic construct
EAAAKGGGPAP

SEQ ID NO: 37653 - RNA, 710 nt, synthetic construct
  source 1..710: mol_type = other RNA
gggtgtatggggtgctcagggaggggtagtatctctggtatggagggcttgtcgtgccctcctagggcagctctccagcctctgacccccacctgacacccagctctcacttgtggctcccagtagctgctagcatgtggcagcggccacaccccgggcaacggcttcgacaggccggctaaaccttgtgagggtagccatcgggtcatcgacccctggtgaaccagggctttgctcacccagcatgtgaagactgcttcggctgaacagacggaagaaaccaataagaaggttcaacggctgagagggcgacgcagcaaagcactgtggagtgcttagggcgtgttggagcacaaaggacaacacggccatccaatgcagctgaggaagtctccagatgtaacaatttttcgtgccactggacccaggcttccaacgccgagagagtgggactgtctctgtgcatcggcttttccacttaaatctctttcacgcacaagtatctttgtgcacactcatctatcctaaccccgtccaccctcttcaagacctgcggcgatgggggagtggcgacgcaacaggtggaggtgaccactggcagttgtagtcacgatcctgcacgtaggcggcccacggaccagtggtcgctcggccctgtgggcagcagggacgttcggcagcatcctgggcgactgagcagccctctctag

SEQ ID NO: 37654 - protein, 12 aa, synthetic construct
GSSGSSGSSGSS

SEQ ID NO: 37655 - protein, 10 aa, synthetic construct
GGGGSGGGGS

SEQ ID NO: 37656 - DNA, 16 bp, unidentified
  source 1..16: mol_type = unassigned DNA
gcgcgctcgctcgctc

SEQ ID NO: 37657 - DNA, 22 bp, unidentified
  source 1..22: mol_type = unassigned DNA
tgagcacggtagcattagtcga

SEQ ID NO: 37658 - DNA, 200 bp, unidentified
  source 1..200: mol_type = unassigned DNA
  misc_difference 1: note = a, c, t, g, unknown or other
  misc_difference 2: note = a, c, t, g, unknown or other
  misc_difference 3: note = a, c, t, g, unknown or other
  misc_difference 4: note = a, c, t, g, unknown or other
  misc_difference 5: note = a, c, t, g, unknown or other
  misc_difference 6: note = a, c, t, g, unknown or other
  misc_difference 7: note = a, c, t, g, unknown or other
  misc_difference 8: note = a, c, t, g, unknown or other
  misc_difference 9: note = a, c, t, g, unknown or other
  misc_difference 10: note = a, c, t, g, unknown or other
  misc_difference 11: note = a, c, t, g, unknown or other
  misc_difference 12: note = a, c, t, g, unknown or other
  misc_difference 13: note = a, c, t, g, unknown or other
  misc_difference 14: note = a, c, t, g, unknown or other
  misc_difference 15: note = a, c, t, g, unknown or other
  misc_difference 16: note = a, c, t, g, unknown or other
  misc_difference 17: note = a, c, t, g, unknown or other
  misc_difference 18: note = a, c, t, g, unknown or other
  misc_difference 19: note = a, c, t, g, unknown or other
  misc_difference 21: note = a, c, t, g, unknown or other
  misc_difference 22: note = a, c, t, g, unknown or other
  misc_difference 23: note = a, c, t, g, unknown or other
  misc_difference 24: note = a, c, t, g, unknown or other
  misc_difference 25: note = a, c, t, g, unknown or other
  misc_difference 27: note = a, c, t, g, unknown or other
  misc_difference 28: note = a, c, t, g, unknown or other
  misc_difference 31: note = a, c, t, g, unknown or other
  misc_difference 32: note = a, c, t, g, unknown or other
  misc_difference 33: note = a, c, t, g, unknown or other
  misc_difference 34: note = a, c, t, g, unknown or other
  misc_difference 36: note = a, c, t, g, unknown or other
  misc_difference 37: note = a, c, t, g, unknown or other
  misc_difference 38: note = a, c, t, g, unknown or other
  misc_difference 39: note = a, c, t, g, unknown or other
  misc_difference 40: note = a, c, t, g, unknown or other
  misc_difference 41: note = a, c, t, g, unknown or other
  misc_difference 42: note = a, c, t, g, unknown or other
  misc_difference 43: note = a, c, t, g, unknown or other
  misc_difference 44: note = a, c, t, g, unknown or other
  misc_difference 45: note = a, c, t, g, unknown or other
  misc_difference 46: note = a, c, t, g, unknown or other
  misc_difference 47: note = a, c, t, g, unknown or other
  misc_difference 48: note = a, c, t, g, unknown or other
  misc_difference 49: note = a, c, t, g, unknown or other
  misc_difference 51: note = a, c, t, g, unknown or other
  misc_difference 52: note = a, c, t, g, unknown or other
  misc_difference 53: note = a, c, t, g, unknown or other
  misc_difference 54: note = a, c, t, g, unknown or other
  misc_difference 55: note = a, c, t, g, unknown or other
  misc_difference 56: note = a, c, t, g, unknown or other
  misc_difference 57: note = a, c, t, g, unknown or other
  misc_difference 58: note = a, c, t, g, unknown or other
  misc_difference 59: note = a, c, t, g, unknown or other
  misc_difference 60: note = a, c, t, g, unknown or other
  misc_difference 61: note = a, c, t, g, unknown or other
  misc_difference 62: note = a, c, t, g, unknown or other
  misc_difference 63: note = a, c, t, g, unknown or other
  misc_difference 64: note = a, c, t, g, unknown or other
  misc_difference 65: note = a, c, t, g, unknown or other
  misc_difference 66: note = a, c, t, g, unknown or other
  misc_difference 68: note = a, c, t, g, unknown or other
  misc_difference 69: note = a, c, t, g, unknown or other
  misc_difference 70: note = a, c, t, g, unknown or other
  misc_difference 71: note = a, c, t, g, unknown or other
  misc_difference 72: note = a, c, t, g, unknown or other
  misc_difference 73: note = a, c, t, g, unknown or other
  misc_difference 74: note = a, c, t, g, unknown or other
  misc_difference 75: note = a, c, t, g, unknown or other
  misc_difference 76: note = a, c, t, g, unknown or other
  misc_difference 77: note = a, c, t, g, unknown or other
  misc_difference 78: note = a, c, t, g, unknown or other
  misc_difference 79: note = a, c, t, g, unknown or other
  misc_difference 80: note = a, c, t, g, unknown or other
  misc_difference 81: note = a, c, t, g, unknown or other
  misc_difference 82: note = a, c, t, g, unknown or other
  misc_difference 83: note = a, c, t, g, unknown or other
  misc_difference 84: note = a, c, t, g, unknown or other
  misc_difference 85: note = a, c, t, g, unknown or other
  misc_difference 86: note = a, c, t, g, unknown or other
  misc_difference 87: note = a, c, t, g, unknown or other
  misc_difference 89: note = a, c, t, g, unknown or other
  misc_difference 90: note = a, c, t, g, unknown or other
  misc_difference 91: note = a, c, t, g, unknown or other
  misc_difference 92: note = a, c, t, g, unknown or other
  misc_difference 93: note = a, c, t, g, unknown or other
  misc_difference 94: note = a, c, t, g, unknown or other
  misc_difference 95: note = a, c, t, g, unknown or other
  misc_difference 96: note = a, c, t, g, unknown or other
  misc_difference 97: note = a, c, t, g, unknown or other
  misc_difference 98: note = a, c, t, g, unknown or other
  misc_difference 99: note = a, c, t, g, unknown or other
  misc_difference 100: note = a, c, t, g, unknown or other
  misc_difference 101: note = a, c, t, g, unknown or other
  misc_difference 102: note = a, c, t, g, unknown or other
  misc_difference 104: note = a, c, t, g, unknown or other
  misc_difference 105: note = a, c, t, g, unknown or other
  misc_difference 106: note = a, c, t, g, unknown or other
  misc_difference 107: note = a, c, t, g, unknown or other
  misc_difference 108: note = a, c, t, g, unknown or other
  misc_difference 109: note = a, c, t, g, unknown or other
  misc_difference 110: note = a, c, t, g, unknown or other
  misc_difference 111: note = a, c, t, g, unknown or other
  misc_difference 112: note = a, c, t, g, unknown or other
  misc_difference 113: note = a, c, t, g, unknown or other
  misc_difference 114: note = a, c, t, g, unknown or other
  misc_difference 115: note = a, c, t, g, unknown or other
  misc_difference 116: note = a, c, t, g, unknown or other
  misc_difference 117: note = a, c, t, g, unknown or other
  misc_difference 118: note = a, c, t, g, unknown or other
  misc_difference 119: note = a, c, t, g, unknown or other
  misc_difference 120: note = a, c, t, g, unknown or other
  misc_difference 121: note = a, c, t, g, unknown or other
  misc_difference 122: note = a, c, t, g, unknown or other
  misc_difference 123: note = a, c, t, g, unknown or other
  misc_difference 125: note = a, c, t, g, unknown or other
  misc_difference 126: note = a, c, t, g, unknown or other
  misc_difference 127: note = a, c, t, g, unknown or other
  misc_difference 128: note = a, c, t, g, unknown or other
  misc_difference 129: note = a, c, t, g, unknown or other
  misc_difference 130: note = a, c, t, g, unknown or other
  misc_difference 131: note = a, c, t, g, unknown or other
  misc_difference 132: note = a, c, t, g, unknown or other
  misc_difference 133: note = a, c, t, g, unknown or other
  misc_difference 134: note = a, c, t, g, unknown or other
  misc_difference 135: note = a, c, t, g, unknown or other
  misc_difference 136: note = a, c, t, g, unknown or other
  misc_difference 137: note = a, c, t, g, unknown or other
  misc_difference 138: note = a, c, t, g, unknown or other
  misc_difference 139: note = a, c, t, g, unknown or other
  misc_difference 140: note = a, c, t, g, unknown or other
  misc_difference 141: note = a, c, t, g, unknown or other
  misc_difference 142: note = a, c, t, g, unknown or other
  misc_difference 145: note = a, c, t, g, unknown or other
  misc_difference 146: note = a, c, t, g, unknown or other
  misc_difference 147: note = a, c, t, g, unknown or other
  misc_difference 148: note = a, c, t, g, unknown or other
  misc_difference 149: note = a, c, t, g, unknown or other
  misc_difference 150: note = a, c, t, g, unknown or other
  misc_difference 151: note = a, c, t, g, unknown or other
  misc_difference 152: note = a, c, t, g, unknown or other
  misc_difference 154: note = a, c, t, g, unknown or other
  misc_difference 155: note = a, c, t, g, unknown or other
  misc_difference 156: note = a, c, t, g, unknown or other
  misc_difference 157: note = a, c, t, g, unknown or other
  misc_difference 158: note = a, c, t, g, unknown or other
  misc_difference 159: note = a, c, t, g, unknown or other
  misc_difference 160: note = a, c, t, g, unknown or other
  misc_difference 161: note = a, c, t, g, unknown or other
  misc_difference 162: note = a, c, t, g, unknown or other
  misc_difference 163: note = a, c, t, g, unknown or other
  misc_difference 164: note = a, c, t, g, unknown or other
  misc_difference 165: note = a, c, t, g, unknown or other
  misc_difference 166: note = a, c, t, g, unknown or other
  misc_difference 167: note = a, c, t, g, unknown or other
  misc_difference 168: note = a, c, t, g, unknown or other
  misc_difference 169: note = a, c, t, g, unknown or other
  misc_difference 170: note = a, c, t, g, unknown or other
  misc_difference 171: note = a, c, t, g, unknown or other
  misc_difference 172: note = a, c, t, g, unknown or other
  misc_difference 173: note = a, c, t, g, unknown or other
  misc_difference 174: note = a, c, t, g, unknown or other
  misc_difference 175: note = a, c, t, g, unknown or other
  misc_difference 176: note = a, c, t, g, unknown or other
  misc_difference 177: note = a, c, t, g, unknown or other
  misc_difference 178: note = a, c, t, g, unknown or other
  misc_difference 180: note = a, c, t, g, unknown or other
  misc_difference 181: note = a, c, t, g, unknown or other
  misc_difference 182: note = a, c, t, g, unknown or other
  misc_difference 183: note = a, c, t, g, unknown or other
  misc_difference 184: note = a, c, t, g, unknown or other
  misc_difference 185: note = a, c, t, g, unknown or other
  misc_difference 186: note = a, c, t, g, unknown or other
  misc_difference 187: note = a, c, t, g, unknown or other
  misc_difference 188: note = a, c, t, g, unknown or other
  misc_difference 189: note = a, c, t, g, unknown or other
  misc_difference 190: note = a, c, t, g, unknown or other
  misc_difference 192: note = a, c, t, g, unknown or other
  misc_difference 193: note = a, c, t, g, unknown or other
  misc_difference 194: note = a, c, t, g, unknown or other
  misc_difference 195: note = a, c, t, g, unknown or other
  misc_difference 196: note = a, c, t, g, unknown or other
  misc_difference 197: note = a, c, t, g, unknown or other
  misc_difference 198: note = a, c, t, g, unknown or other
  misc_difference 199: note = a, c, t, g, unknown or other
  misc_difference 200: note = a, c, t, g, unknown or other
nnnnnnnnnnnnnnnnnnntnnnnncnngtnnnnannnnnnnnnnnnnncnnnnnnnnnnnnnnnntnnnnnnnnnnnnnnnnnnnntnnnnnnnnnnnnnntnnnnnnnnnnnnnnnnnnnncnnnnnnnnnnnnnnnnnngcnnnnnnnntnnnnnnnnnnnnnnnnnnnnnnnnntnnnnnnnnnnnannnnnnnnn

SEQ ID NO: 37659 - DNA, 200 bp, unidentified
  source 1..200: mol_type = unassigned DNA
  misc_difference 1: note = a, c, t, g, unknown or other
  misc_difference 3: note = a, c, t, g, unknown or other
  misc_difference 4: note = a, c, t, g, unknown or other
  misc_difference 5: note = a, c, t, g, unknown or other
  misc_difference 6: note = a, c, t, g, unknown or other
  misc_difference 7: note = a, c, t, g, unknown or other
  misc_difference 8: note = a, c, t, g, unknown or other
  misc_difference 9: note = a, c, t, g, unknown or other
  misc_difference 10: note = a, c, t, g, unknown or other
  misc_difference 11: note = a, c, t, g, unknown or other
  misc_difference 12: note = a, c, t, g, unknown or other
  misc_difference 13: note = a, c, t, g, unknown or other
  misc_difference 15: note = a, c, t, g, unknown or other
  misc_difference 16: note = a, c, t, g, unknown or other
  misc_difference 17: note = a, c, t, g, unknown or other
  misc_difference 18: note = a, c, t, g, unknown or other
  misc_difference 19: note = a, c, t, g, unknown or other
  misc_difference 20: note = a, c, t, g, unknown or other
  misc_difference 21: note = a, c, t, g, unknown or other
  misc_difference 22: note = a, c, t, g, unknown or other
  misc_difference 23: note = a, c, t, g, unknown or other
  misc_difference 24: note = a, c, t, g, unknown or other
  misc_difference 25: note = a, c, t, g, unknown or other
  misc_difference 26: note = a, c, t, g, unknown or other
  misc_difference 27: note = a, c, t, g, unknown or other
  misc_difference 28: note = a, c, t, g, unknown or other
  misc_difference 29: note = a, c, t, g, unknown or other
  misc_difference 30: note = a, c, t, g, unknown or other
  misc_difference 31: note = a, c, t, g, unknown or other
  misc_difference 32: note = a, c, t, g, unknown or other
  misc_difference 33: note = a, c, t, g, unknown or other
  misc_difference 34: note = a, c, t, g, unknown or other
  misc_difference 35: note = a, c, t, g, unknown or other
  misc_difference 37: note = a, c, t, g, unknown or other
  misc_difference 38: note = a, c, t, g, unknown or other
  misc_difference 39: note = a, c, t, g, unknown or other
  misc_difference 40: note = a, c, t, g, unknown or other
  misc_difference 41: note = a, c, t, g, unknown or other
  misc_difference 42: note = a, c, t, g, unknown or other
  misc_difference 43: note = a, c, t, g, unknown or other
  misc_difference 44: note = a, c, t, g, unknown or other
  misc_difference 45: note = a, c, t, g, unknown or other
  misc_difference 46: note = a, c, t, g, unknown or other
  misc_difference 47: note = a, c, t, g, unknown or other
  misc_difference 48: note = a, c, t, g, unknown or other
  misc_difference 49: note = a, c, t, g, unknown or other
  misc_difference 50: note = a, c, t, g, unknown or other
  misc_difference 51: note = a, c, t, g, unknown or other
  misc_difference 52: note = a, c, t, g, unknown or other
  misc_difference 53: note = a, c, t, g, unknown or other
  misc_difference 54: note = a, c, t, g, unknown or other
  misc_difference 55: note = a, c, t, g, unknown or other
  misc_difference 56: note = a, c, t, g, unknown or other
  misc_difference 57: note = a, c, t, g, unknown or other
  misc_difference 58: note = a, c, t, g, unknown or other
  misc_difference 59: note = a, c, t, g, unknown or other
  misc_difference 60: note = a, c, t, g, unknown or other
  misc_difference 61: note = a, c, t, g, unknown or other
  misc_difference 62: note = a, c, t, g, unknown or other
  misc_difference 63: note = a, c, t, g, unknown or other
  misc_difference 64: note = a, c, t, g, unknown or other
  misc_difference 65: note = a, c, t, g, unknown or other
  misc_difference 66: note = a, c, t, g, unknown or other
  misc_difference 67: note = a, c, t, g, unknown or other
  misc_difference 68: note = a, c, t, g, unknown or other
  misc_difference 69: note = a, c, t, g, unknown or other
  misc_difference 70: note = a, c, t, g, unknown or other
  misc_difference 71: note = a, c, t, g, unknown or other
  misc_difference 72: note = a, c, t, g, unknown or other
  misc_difference 74: note = a, c, t, g, unknown or other
  misc_difference 75: note = a, c, t, g, unknown or other
  misc_difference 76: note = a, c, t, g, unknown or other
  misc_difference 78: note = a, c, t, g, unknown or other
  misc_difference 79: note = a, c, t, g, unknown or other
  misc_difference 80: note = a, c, t, g, unknown or other
  misc_difference 81: note = a, c, t, g, unknown or other
  misc_difference 82: note = a, c, t, g, unknown or other
  misc_difference 83: note = a, c, t, g, unknown or other
  misc_difference 84: note = a, c, t, g, unknown or other
  misc_difference 85: note = a, c, t, g, unknown or other
  misc_difference 86: note = a, c, t, g, unknown or other
  misc_difference 87: note = a, c, t, g, unknown or other
  misc_difference 88: note = a, c, t, g, unknown or other
  misc_difference 89: note = a, c, t, g, unknown or other
  misc_difference 91: note = a, c, t, g, unknown or other
  misc_difference 92: note = a, c, t, g, unknown or other
  misc_difference 93: note = a, c, t, g, unknown or other
  misc_difference 94: note = a, c, t, g, unknown or other
  misc_difference 95: note = a, c, t, g, unknown or other
  misc_difference 96: note = a, c, t, g, unknown or other
  misc_difference 97: note = a, c, t, g, unknown or other
  misc_difference 98: note = a, c, t, g, unknown or other
  misc_difference 99: note = a, c, t, g, unknown or other
  misc_difference 100: note = a, c, t, g, unknown or other
  misc_difference 101: note = a, c, t, g, unknown or other
  misc_difference 102: note = a, c, t, g, unknown or other
  misc_difference 103: note = a, c, t, g, unknown or other
  misc_difference 104: note = a, c, t, g, unknown or other
  misc_difference 105: note = a, c, t, g, unknown or other
  misc_difference 106: note = a, c, t, g, unknown or other
  misc_difference 107: note = a, c, t, g, unknown or other
  misc_difference 108: note = a, c, t, g, unknown or other
  misc_difference 109: note = a, c, t, g, unknown or other
  misc_difference 110: note = a, c, t, g, unknown or other
  misc_difference 111: note = a, c, t, g, unknown or other
  misc_difference 112: note = a, c, t, g, unknown or other
  misc_difference 114: note = a, c, t, g, unknown or other
  misc_difference 115: note = a, c, t, g, unknown or other
  misc_difference 116: note = a, c, t, g, unknown or other
  misc_difference 117: note = a, c, t, g, unknown or other
  misc_difference 118: note = a, c, t, g, unknown or other
  misc_difference 119: note = a, c, t, g, unknown or other
  misc_difference 120: note = a, c, t, g, unknown or other
  misc_difference 121: note = a, c, t, g, unknown or other
  misc_difference 122: note = a, c, t, g, unknown or other
  misc_difference 123: note = a, c, t, g, unknown or other
  misc_difference 124: note = a, c, t, g, unknown or other
  misc_difference 125: note = a, c, t, g, unknown or other
  misc_difference 126: note = a, c, t, g, unknown or other
  misc_difference 127: note = a, c, t, g, unknown or other
  misc_difference 129: note = a, c, t, g, unknown or other
  misc_difference 131: note = a, c, t, g, unknown or other
  misc_difference 132: note = a, c, t, g, unknown or other
  misc_difference 133: note = a, c, t, g, unknown or other
  misc_difference 134: note = a, c, t, g, unknown or other
  misc_difference 135: note = a, c, t, g, unknown or other
  misc_difference 136: note = a, c, t, g, unknown or other
  misc_difference 138: note = a, c, t, g, unknown or other
  misc_difference 139: note = a, c, t, g, unknown or other
  misc_difference 140: note = a, c, t, g, unknown or other
  misc_difference 141: note = a, c, t, g, unknown or other
  misc_difference 142: note = a, c, t, g, unknown or other
  misc_difference 144: note = a, c, t, g, unknown or other
  misc_difference 145: note = a, c, t, g, unknown or other
  misc_difference 146: note = a, c, t, g, unknown or other
  misc_difference 147: note = a, c, t, g, unknown or other
  misc_difference 148: note = a, c, t, g, unknown or other
  misc_difference 149: note = a, c, t, g, unknown or other
  misc_difference 150: note = a, c, t, g, unknown or other
  misc_difference 151: note = a, c, t, g, unknown or other
  misc_difference 153: note = a, c, t, g, unknown or other
  misc_difference 154: note = a, c, t, g, unknown or other
  misc_difference 155: note = a, c, t, g, unknown or other
  misc_difference 156: note = a, c, t, g, unknown or other
  misc_difference 157: note = a, c, t, g, unknown or other
  misc_difference 158: note = a, c, t, g, unknown or other
  misc_difference 159: note = a, c, t, g, unknown or other
  misc_difference 160: note = a, c, t, g, unknown or other
  misc_difference 161: note = a, c, t, g, unknown or other
  misc_difference 162: note = a, c, t, g, unknown or other
  misc_difference 163: note = a, c, t, g, unknown or other
  misc_difference 164: note = a, c, t, g, unknown or other
  misc_difference 165: note = a, c, t, g, unknown or other
  misc_difference 166: note = a, c, t, g, unknown or other
  misc_difference 168: note = a, c, t, g, unknown or other
  misc_difference 169: note = a, c, t, g, unknown or other
  misc_difference 170: note = a, c, t, g, unknown or other
  misc_difference 171: note = a, c, t, g, unknown or other
  misc_difference 172: note = a, c, t, g, unknown or other
  misc_difference 173: note = a, c, t, g, unknown or other
  misc_difference 174: note = a, c, t, g, unknown or other
  misc_difference 175: note = a, c, t, g, unknown or other
  misc_difference 176: note = a, c, t, g, unknown or other
  misc_difference 177: note = a, c, t, g, unknown or other
  misc_difference 178: note = a, c, t, g, unknown or other
  misc_difference 179: note = a, c, t, g, unknown or other
  misc_difference 180: note = a, c, t, g, unknown or other
  misc_difference 182: note = a, c, t, g, unknown or other
  misc_difference 183: note = a, c, t, g, unknown or other
  misc_difference 184: note = a, c, t, g, unknown or other
  misc_difference 185: note = a, c, t, g, unknown or other
  misc_difference 186: note = a, c, t, g, unknown or other
  misc_difference 187: note = a, c, t, g, unknown or other
  misc_difference 188: note = a, c, t, g, unknown or other
  misc_difference 189: note = a, c, t, g, unknown or other
  misc_difference 190: note = a, c, t, g, unknown or other
  misc_difference 191: note = a, c, t, g, unknown or other
  misc_difference 192: note = a, c, t, g, unknown or other
  misc_difference 193: note = a, c, t, g, unknown or other
  misc_difference 194: note = a, c, t, g, unknown or other
  misc_difference 195: note = a, c, t, g, unknown or other
  misc_difference 196: note = a, c, t, g, unknown or other
  misc_difference 197: note = a, c, t, g, unknown or other
  misc_difference 198: note = a, c, t, g, unknown or other
  misc_difference 199: note = a, c, t, g, unknown or other
  misc_difference 200: note = a, c, t, g, unknown or other
ntnnnnnnnnnnntnnnnnnnnnnnnnnnnnnnnngnnnnnnnnnnnnnnnnnnnnnnnnnnnnnnnnnnnntnnntnnnnnnnnnnnnannnnnnnnnnnnnnnnnnnnnntnnnnnnnnnnnnnngngnnnnnntnnnnncnnnnnnnntnnnnnnnnnnnnnntnnnnnnnnnnnnnannnnnnnnnnnnnnnnnnn

SEQ ID NO: 37660 - DNA, 200 bp, unidentified
  source 1..200: mol_type = unassigned DNA
  misc_difference 1: note = a, c, t, g, unknown or other
  misc_difference 2: note = a, c, t, g, unknown or other
  misc_difference 3: note = a, c, t, g, unknown or other
  misc_difference 4: note = a, c, t, g, unknown or other
  misc_difference 5: note = a, c, t, g, unknown or other
  misc_difference 6: note = a, c, t, g, unknown or other
  misc_difference 7: note = a, c, t, g, unknown or other
  misc_difference 8: note = a, c, t, g, unknown or other
  misc_difference 9: note = a, c, t, g, unknown or other
  misc_difference 10: note = a, c, t, g, unknown or other
  misc_difference 11: note = a, c, t, g, unknown or other
  misc_difference 12: note = a, c, t, g, unknown or other
  misc_difference 13: note = a, c, t, g, unknown or other
  misc_difference 14: note = a, c, t, g, unknown or other
  misc_difference 15: note = a, c, t, g, unknown or other
  misc_difference 16: note = a, c, t, g, unknown or other
  misc_difference 17: note = a, c, t, g, unknown or other
  misc_difference 18: note = a, c, t, g, unknown or other
  misc_difference 19: note = a, c, t, g, unknown or other
  misc_difference 20: note = a, c, t, g, unknown or other
  misc_difference 21: note = a, c, t, g, unknown or other
  misc_difference 22: note = a, c, t, g, unknown or other
  misc_difference 24: note = a, c, t, g, unknown or other
  misc_difference 25: note = a, c, t, g, unknown or other
  misc_difference 26: note = a, c, t, g, unknown or other
  misc_difference 27: note = a, c, t, g, unknown or other
  misc_difference 28: note = a, c, t, g, unknown or other
  misc_difference 29: note = a, c, t, g, unknown or other
  misc_difference 30: note = a, c, t, g, unknown or other
  misc_difference 31: note = a, c, t, g, unknown or other
  misc_difference 32: note = a, c, t, g, unknown or other
  misc_difference 33: note = a, c, t, g, unknown or other
  misc_difference 34: note = a, c, t, g, unknown or other
  misc_difference 35: note = a, c, t, g, unknown or other
  misc_difference 36: note = a, c, t, g, unknown or other
  misc_difference 37: note = a, c, t, g, unknown or other
  misc_difference 38: note = a, c, t, g, unknown or other
  misc_difference 39: note = a, c, t, g, unknown or other
  misc_difference 41: note = a, c, t, g, unknown or other
  misc_difference 42: note = a, c, t, g, unknown or other
  misc_difference 43: note = a, c, t, g, unknown or other
  misc_difference 44: note = a, c, t, g, unknown or other
  misc_difference 45: note = a, c, t, g, unknown or other
  misc_difference 47: note = a, c, t, g, unknown or other
  misc_difference 48: note = a, c, t, g, unknown or other
  misc_difference 49: note = a, c, t, g, unknown or other
  misc_difference 51: note = a, c, t, g, unknown or other
  misc_difference 52: note = a, c, t, g, unknown or other
  misc_difference 53: note = a, c, t, g, unknown or other
  misc_difference 54: note = a, c, t, g, unknown or other
  misc_difference 55: note = a, c, t, g, unknown or other
  misc_difference 56: note = a, c, t, g, unknown or other
  misc_difference 57: note = a, c, t, g, unknown or other
  misc_difference 58: note = a, c, t, g, unknown or other
  misc_difference 59: note = a, c, t, g, unknown or other
  misc_difference 60: note = a, c, t, g, unknown or other
  misc_difference 61: note = a, c, t, g, unknown or other
  misc_difference 62: note = a, c, t, g, unknown or other
  misc_difference 63: note = a, c, t, g, unknown or other
  misc_difference 64: note = a, c, t, g, unknown or other
  misc_difference 65: note = a, c, t, g, unknown or other
  misc_difference 66: note = a, c, t, g, unknown or other
  misc_difference 67: note = a, c, t, g, unknown or other
  misc_difference 68: note = a, c, t, g, unknown or other
  misc_difference 69: note = a, c, t, g, unknown or other
  misc_difference 70: note = a, c, t, g, unknown or other
  misc_difference 71: note = a, c, t, g, unknown or other
  misc_difference 72: note = a, c, t, g, unknown or other
  misc_difference 73: note = a, c, t, g, unknown or other
  misc_difference 74: note = a, c, t, g, unknown or other
  misc_difference 75: note = a, c, t, g, unknown or other
  misc_difference 76: note = a, c, t, g, unknown or other
  misc_difference 77: note = a, c, t, g, unknown or other
  misc_difference 78: note = a, c, t, g, unknown or other
  misc_difference 79: note = a, c, t, g, unknown or other
  misc_difference 80: note = a, c, t, g, unknown or other
  misc_difference 81: note = a, c, t, g, unknown or other
  misc_difference 82: note = a, c, t, g, unknown or other
  misc_difference 83: note = a, c, t, g, unknown or other
  misc_difference 84: note = a, c, t, g, unknown or other
  misc_difference 85: note = a, c, t, g, unknown or other
  misc_difference 86: note = a, c, t, g, unknown or other
  misc_difference 87: note = a, c, t, g, unknown or other
  misc_difference 88: note = a, c, t, g, unknown or other
  misc_difference 89: note = a, c, t, g, unknown or other
  misc_difference 90: note = a, c, t, g, unknown or other
  misc_difference 91: note = a, c, t, g, unknown or other
  misc_difference 92: note = a, c, t, g, unknown or other
  misc_difference 93: note = a, c, t, g, unknown or other
  misc_difference 94: note = a, c, t, g, unknown or other
  misc_difference 95: note = a, c, t, g, unknown or other
  misc_difference 96: note = a, c, t, g, unknown or other
  misc_difference 98: note = a, c, t, g, unknown or other
  misc_difference 99: note = a, c, t, g, unknown or other
  misc_difference 100: note = a, c, t, g, unknown or other
  misc_difference 101: note = a, c, t, g, unknown or other
  misc_difference 102: note = a, c, t, g, unknown or other
  misc_difference 103: note = a, c, t, g, unknown or other
  misc_difference 104: note = a, c, t, g, unknown or other
  misc_difference 105: note = a, c, t, g, unknown or other
  misc_difference 106: note = a, c, t, g, unknown or other
  misc_difference 107: note = a, c, t, g, unknown or other
  misc_difference 108: note = a, c, t, g, unknown or other
  misc_difference 109: note = a, c, t, g, unknown or other
  misc_difference 110: note = a, c, t, g, unknown or other
  misc_difference 111: note = a, c, t, g, unknown or other
  misc_difference 113: note = a, c, t, g, unknown or other
  misc_difference 114: note = a, c, t, g, unknown or other
  misc_difference 115: note = a, c, t, g, unknown or other
  misc_difference 116: note = a, c, t, g, unknown or other
  misc_difference 117: note = a, c, t, g, unknown or other
  misc_difference 118: note = a, c, t, g, unknown or other
  misc_difference 119: note = a, c, t, g, unknown or other
  misc_difference 120: note = a, c, t, g, unknown or other
  misc_difference 121: note = a, c, t, g, unknown or other
  misc_difference 122: note = a, c, t, g, unknown or other
  misc_difference 123: note = a, c, t, g, unknown or other
  misc_difference 124: note = a, c, t, g, unknown or other
  misc_difference 125: note = a, c, t, g, unknown or other
  misc_difference 127: note = a, c, t, g, unknown or other
  misc_difference 129: note = a, c, t, g, unknown or other
  misc_difference 130: note = a, c, t, g, unknown or other
  misc_difference 132: note = a, c, t, g, unknown or other
  misc_difference 133: note = a, c, t, g, unknown or other
  misc_difference 134: note = a, c, t, g, unknown or other
  misc_difference 135: note = a, c, t, g, unknown or other
  misc_difference 136: note = a, c, t, g, unknown or other
  misc_difference 137: note = a, c, t, g, unknown or other
  misc_difference 138: note = a, c, t, g, unknown or other
  misc_difference 139: note = a, c, t, g, unknown or other
  misc_difference 140: note = a, c, t, g, unknown or other
  misc_difference 141: note = a, c, t, g, unknown or other
  misc_difference 142: note = a, c, t, g, unknown or other
  misc_difference 143: note = a, c, t, g, unknown or other
  misc_difference 144: note = a, c, t, g, unknown or other
  misc_difference 145: note = a, c, t, g, unknown or other
  misc_difference 146: note = a, c, t, g, unknown or other
  misc_difference 147: note = a, c, t, g, unknown or other
  misc_difference 149: note = a, c, t, g, unknown or other
  misc_difference 150: note = a, c, t, g, unknown or other
  misc_difference 151: note = a, c, t, g, unknown or other
  misc_difference 152: note = a, c, t, g, unknown or other
  misc_difference 153: note = a, c, t, g, unknown or other
  misc_difference 154: note = a, c, t, g, unknown or other
  misc_difference 155: note = a, c, t, g, unknown or other
  misc_difference 156: note = a, c, t, g, unknown or other
  misc_difference 157: note = a, c, t, g, unknown or other
  misc_difference 158: note = a, c, t, g, unknown or other
  misc_difference 159: note = a, c, t, g, unknown or other
  misc_difference 160: note = a, c, t, g, unknown or other
  misc_difference 161: note = a, c, t, g, unknown or other
  misc_difference 163: note = a, c, t, g, unknown or other
  misc_difference 164: note = a, c, t, g, unknown or other
  misc_difference 165: note = a, c, t, g, unknown or other
  misc_difference 166: note = a, c, t, g, unknown or other
  misc_difference 167: note = a, c, t, g, unknown or other
  misc_difference 168: note = a, c, t, g, unknown or other
  misc_difference 170: note = a, c, t, g, unknown or other
  misc_difference 171: note = a, c, t, g, unknown or other
  misc_difference 172: note = a, c, t, g, unknown or other
  misc_difference 173: note = a, c, t, g, unknown or other
  misc_difference 174: note = a, c, t, g, unknown or other
  misc_difference 176: note = a, c, t, g, unknown or other
  misc_difference 177: note = a, c, t, g, unknown or other
  misc_difference 178: note = a, c, t, g, unknown or other
  misc_difference 179: note = a, c, t, g, unknown or other
  misc_difference 180: note = a, c, t, g, unknown or other
  misc_difference 181: note = a, c, t, g, unknown or other
  misc_difference 183: note = a, c, t, g, unknown or other
  misc_difference 184: note = a, c, t, g, unknown or other
  misc_difference 185: note = a, c, t, g, unknown or other
  misc_difference 186: note = a, c, t, g, unknown or other
  misc_difference 187: note = a, c, t, g, unknown or other
  misc_difference 188: note = a, c, t, g, unknown or other
  misc_difference 189: note = a, c, t, g, unknown or other
  misc_difference 190: note = a, c, t, g, unknown or other
  misc_difference 191: note = a, c, t, g, unknown or other
  misc_difference 192: note = a, c, t, g, unknown or other
  misc_difference 193: note = a, c, t, g, unknown or other
  misc_difference 195: note = a, c, t, g, unknown or other
  misc_difference 196: note = a, c, t, g, unknown or other
  misc_difference 197: note = a, c, t, g, unknown or other
  misc_difference 198: note = a, c, t, g, unknown or other
  misc_difference 199: note = a, c, t, g, unknown or other
  misc_difference 200: note = a, c, t, g, unknown or other
nnnnnnnnnnnnnnnnnnnnnnannnnnnnnnnnnnnnnannnnncnnnannnnnnnnnnnnnnnnnnnnnnnnnnnnnnnnnnnnnnnnnnnnnncnnnnnnnnnnnnnnannnnnnnnnnnnnantnntnnnnnnnnnnnnnnnnannnnnnnnnnnnngnnnnnnannnnntnnnnnnannnnnnnnnnnannnnnn

SEQ ID NO: 37661 - DNA, 26 bp, Homo sapiens
  source 1..26: mol_type = genomic DNA
ctgacccttctctctctcccccagag

SEQ ID NO: 37662 - DNA, 15 bp, Homo sapiens
  source 1..15: mol_type = genomic DNA
tttctctcccacaag

SEQ ID NO: 37663 - RNA, 21 nt, Homo sapiens
  source 1..21: mol_type = genomic RNA
cataaagtagaaagcactact

SEQ ID NO: 37664 - RNA, 23 nt, Homo sapiens
  source 1..23: mol_type = genomic RNA
tgtagtgtttcctactttatgga

SEQ ID NO: 37665 - RNA, 24 nt, Homo sapiens
  source 1..24: mol_type = genomic RNA
tttggcaatggtagaactcacact

SEQ ID NO: 37666 - RNA, 21 nt, Homo sapiens
  source 1..21: mol_type = genomic RNA
tggttctagacttgccaacta

SEQ ID NO: 37667 - RNA, 22 nt, Homo sapiens
  source 1..22: mol_type = genomic RNA
tatggcactggtagaattcact

SEQ ID NO: 37668 - RNA, 22 nt, Homo sapiens
  source 1..22: mol_type = genomic RNA
gtgaattaccgaagggccataa

SEQ ID NO: 37669 - RNA, 22 nt, Homo sapiens
  source 1..22: mol_type = genomic RNA
tggagtgtgacaatggtgtttg

SEQ ID NO: 37670 - RNA, 22 nt, Homo sapiens
  source 1..22: mol_type = genomic RNA
aacgccattatcacactaaata

SEQ ID NO: 37671 - RNA, 100 nt, synthetic construct
  source 1..100: mol_type = other RNA
gagaatcaaaatcggtgaatgttttagagctagaaatagcaagttaaaataaggctagtccgttatcaacttgaaaaagtggcaccgagtcggtgctttt

SEQ ID NO: 37672 - RNA, 100 nt, synthetic construct; identical to SEQ ID NO: 18216
  source 1..100: mol_type = other RNA

SEQ ID NO: 37673 - DNA, 16 bp, synthetic construct
  source 1..16: mol_type = other DNA
  modified_base 1: mod_base = OTHER; note = ZEN quencher attached to a nucleotide sequence
  modified_base 16: mod_base = OTHER; note = 3' Iowa Black FQ modified nucleotide
gaactttgctgccaca

SEQ ID NO: 37674 - DNA, 26 bp, synthetic construct
  source 1..26: mol_type = other DNA
gaactctcttaagactacctttctcc

SEQ ID NO: 37675 - DNA, 22 bp, synthetic construct
  source 1..22: mol_type = other DNA
cctttcttgcagttgagttgtg

SEQ ID NO: 37676 - DNA, 17 bp, synthetic construct
  source 1..17: mol_type = other DNA
  modified_base 1: mod_base = OTHER; note = ZEN quencher attached to a nucleotide sequence
  modified_base 17: mod_base = OTHER; note = 3' Iowa Black FQ modified nucleotide
acacccaaaggattgag

SEQ ID NO: 37677 - DNA, 25 bp, synthetic construct
  source 1..25: mol_type = other DNA
gaatctgaactctcttcaacctttg

SEQ ID NO: 37678 - DNA, 22 bp, synthetic construct
  source 1..22: mol_type = other DNA
atcttaagctgctgggtattgt

SEQ ID NO: 37679 - DNA, 20 bp, synthetic construct
  source 1..20: mol_type = other DNA
gaggtgtccgtgttcctaaa

SEQ ID NO: 37680 - DNA, 23 bp, synthetic construct
  source 1..23: mol_type = other DNA
agaatctgaactctcttcaacct

SEQ ID NO: 37681 - DNA, 18 bp, synthetic construct
  source 1..18: mol_type = other DNA
  modified_base 1: mod_base = OTHER; note = ZEN quencher attached to a nucleotide sequence
  modified_base 18: mod_base = OTHER; note = 3' Iowa Black FQ modified nucleotide
ctacacaggtgagttggc

SEQ ID NO: 37682 - DNA, 22 bp, synthetic construct
  source 1..22: mol_type = other DNA
gacctcaatcctttgggtgtat

SEQ ID NO: 37683 - DNA, 11 bp, synthetic construct
  source 1..11: mol_type = other DNA
  modified_base 1: mod_base = OTHER; note = ZEN quencher attached to a nucleotide sequence
  modified_base 11: mod_base = OTHER; note = 3' Iowa Black FQ modified nucleotide
ggcctgagcag

SEQ ID NO: 37684 - DNA, 26 bp, synthetic construct
  source 1..26: mol_type = other DNA
  modified_base 1: mod_base = OTHER; note = 5' 6-carboxy-X-rhodamine modified nucleotide
  modified_base 26: mod_base = OTHER; note = 3' Iowa Black RQ modified nucleotide
agagaactgagtggagtcaaggctga

SEQ ID NO: 37685 - DNA, 20 bp, synthetic construct
  source 1..20: mol_type = other DNA
tccaggagggagaattgatg

SEQ ID NO: 37686 - DNA, 18 bp, synthetic construct
  source 1..18: mol_type = other DNA
atggtccgtctcaggaaa

SEQ ID NO: 37687 - protein, 2094 aa, synthetic construct
MPAAKRVKLDGGDKKYSIGLDIGTNSVGWAVITDEYKVPSKKFKVLGNTDRHSIKKNLIGALLFDSGETAEATRLKRTARRRYTRRKNRICYLQEIFSNEMAKVDDSFFHRLEESFLVEEDKKHERHPIFGNIVDEVAYHEKYPTIYHLRKKLVDSTDKADLRLIYLALAHMIKFRGHFLIEGDLNPDNSDVDKLFIQLVQTYNQLFEENPINASGVDAKAILSARLSKSRRLENLIAQLPGEKKNGLFGNLIALSLGLTPNFKSNFDLAEDAKLQLSKDTYDDDLDNLLAQIGDQYADLFLAAKNLSDAILLSDILRVNTEITKAPLSASMIKRYDEHHQDLTLLKALVRQQLPEKYKEIFFDQSKNGYAGYIDGGASQEEFYKFIKPILEKMDGTEELLVKLNREDLLRKQRTFDNGSIPHQIHLGELHAILRRQEDFYPFLKDNREKIEKILTFRIPYYVGPLARGNSRFAWMTRKSEETITPWNFEEVVDKGASAQSFIERMTNFDKNLPNEKVLPKHSLLYEYFTVYNELTKVKYVTEGMRKPAFLSGEQKKAIVDLLFKTNRKVTVKQLKEDYFKKIECFDSVEISGVEDRFNASLGTYHDLLKIIKDKDFLDNEENEDILEDIVLTLTLFEDREMIEERLKTYAHLFDDKVMKQLKRRRYTGWGRLSRKLINGIRDKQSGKTILDFLKSDGFANRNFMQLIHDDSLTFKEDIQKAQVSGQGDSLHEHIANLAGSPAIKKGILQTVKVVDELVKVMGRHKPENIVIEMARENQTTQKGQKNSRERMKRIEEGIKELGSQILKEHPVENTQLQNEKLYLYYLQNGRDMYVDQELDINRLSDYDVDHIVPQSFLKDDSIDNKVLTRSDKARGKSDNVPSEEVVKKMKNYWRQLLNAKLITQRKFDNLTKAERGGLSELDKAGFIKRQLVETRQITKHVAQILDSRMNTKYDENDKLIREVKVITLKSKLVSDFRKDFQFYKVREINNYHHAHDAYLNAVVGTALIKKYPKLESEFVYGDYKVYDVRKMIAKSEQEIGKATAKYFFYSNIMNFFKTEITLANGEIRKRPLIETNGETGEIVWDKGRDFATVRKVLSMPQVNIVKKTEVQTGGFSKESILPKRNSDKLIARKKDWDPKKYGGFDSPTVAYSVLVVAKVEKGKSKKLKSVKELLGITIMERSSFEKNPIDFLEAKGYKEVKKDLIIKLPKYSLFELENGRKRMLASAGELQKGNELALPSKYVNFLYLASHYEKLKGSPEDNEQKQLFVEQHKHYLDEIIEQISEFSKRVILADANLDKVLSAYNKHRDKPIREQAENIIHLFTLTNLGAPAAFKYFDTTIDRKRYTSTKEVLDATLIHQSITGLYETRIDLSQLGGDGGGGGGGSEAAAKGGVLNLEEEYRLHEKPVPSSIDPSWLQLFPTVWAERAGMGLANQVPPVVVELRSGASPVAVRQYPMSKEAREGIRPHIQRFLDLGVLVPCQSPWNTPLLPVKKPGTNDYRPVQDLREINKRVQDIHPTVPNPYNLLSSLPPSHTWYSVLDLKDAFFCLKLHPNSQPLFAFEWRDPEKGNTGQLTWTRLPQGFKNSPTLFNEALHRDLAPFRALNPQVVLLQYVDDLLVAAPTYRDCKEGTQKLLQELSKLGYRVSAKKAQLCQKEVTYLGYLLKEGKRWLTPARKATVMKIPPPTTPRQVREFLGTAGFCRLWIPGFASLAAPLYPLTKPSIPFIWTEEHQKAFDRIKEALLSAPALALPDLTKPFTLYVDERAGVARGVLTQTLGPWRRPVAYLSKKLDPVASGWPTCLKAVAAVALLLKDADKLTLGQNVTVIASHSLESIVRQPPDRWMTNARMTHYQSLLLNERVSFAPPAVLNPATLLPVESEATPVHRCSEILAEETGTRRDLKDQPLPGVPAWYTDGSSFIAEGKRRAGAAIVDGKRTVWASSLPEGTSAQKAELVALTQALRLAEGKDINIYTDSRYAFATAHIHGAIYKQRGWLTSAGKDIKNKEEILALLEAIHLPKRVAIIHCPGHQKGNDPVATGNRRADEAAKQAALSTRVLAETTKPAGKRTADGSEFEKRTADGSEFESPKKKAKVE
